(19) United States
(12) Patent Application Publication
(10) Pub. No.: US 2011/0071767 A1
(43) Pub. Date: Mar. 24, 2011

(54) Hepatotoxicity Molecular Models

(75) Inventors: Mark Porter, Gaithersburg, MD (US); Brandon Higgs, Gaithersburg, MD (US); Donna Mendrick, Gaithersburg, MD (US); Michael Elashoff, Gaithersburg, MD (US)

(73) Assignee: OCIMUM BIOSOLUNTIONS, INC., INDIANAPOLIS, INDIANA (IN)

(21) Appl. No.: 11/547,759

(22) PCT Filed: Apr. 7, 2005
(86) PCT No.: PCT/US05/11532

§ 371 Date: Jan. 13, 2008

(51) Int. Cl. G01N 33/52; G01N 33/48

(52) U.S. Cl. 702/20

(57) ABSTRACT

The present invention includes methods of predicting hepatotoxicity of test agents and methods of generating hepatotoxicity prediction models using algorithms for analyzing quantitative gene expression information. The invention also includes microarrays, computer systems comprising the toxicity prediction models, as well as methods of using the computer systems by remote users for determining the toxicity of test agents.

### RELATED APPLICATIONS

[0001] This application is entitled to priority pursuant to 35 U.S.C. §119(e) to U.S. Provisional Patent Application No. 60/559,949, which was filed on Apr. 7, 2004. This application is also related to U.S. Provisional Application No. 60/554,981, entitled “Methods for molecular toxicology modeling,” filed Mar. 22, 2004, PCT Application No. PCT/US03/03194, filed Jan. 31, 2003 and PCT Application No. PCT/US01/23872, filed Jul. 31, 2001, all of which are herein incorporated by reference in their entirety.

### SEQUENCE LISTING SUBMISSION ON COMPACT DISC

[0002] The Sequence Listing submitted concurrently herewith on compact disc under 37 C.F.R. §§1.821(c) and 1.821(e) is herein incorporated by reference in its entirety. Four copies of the Sequence Listing, one on each of four compact discs are provided. Copy 1, Copy 2 and Copy 3 are identical. Copies 1, 2 and 3 are also identical to the CRF. Each electronic copy of the Sequence Listing was created on Mar. 28, 2005 with a file size of 5995 KB. The file names are as follows: Copy 1—gene logic 5134-wo.txt; Copy 2—gene logic 5134-wo.txt; Copy 3—gene logic 5134-wo.txt.; and CRF—gene logic 5134-wo.txt.

### BACKGROUND OF THE INVENTION

[0003] The need for methods of assessing the toxic impact of a compound, pharmaceutical agent or environmental pollutant on a cell or living organism has led to the development of procedures which utilize living organisms as biological monitors. The simplest and most convenient of these systems utilize unicellular microorganisms such as yeast and bacteria, since they are the most easily maintained and manipulated. In addition, unicellular screening systems often use easily detectable changes in phenotype to monitor the effect of test compounds on the cell. Unicellular organisms, however, are inadequate models for estimating the potential effects of many compounds on complex multicellular animals, as they do not have the ability to carry out biotransformations.

[0004] The biotransformation of chemical compounds by multicellular organisms is a significant factor in determining the overall toxicity of agents to which they are exposed. Accordingly, multicellular screening systems may be preferred or required to detect the toxic effects of compounds. The use of multicellular organisms as toxicology screening tools has been significantly hampered, however, by the lack of convenient screening mechanisms or endpoints, such as those available in yeast or bacterial systems. Additionally, certain previous attempts to produce toxicology prediction systems have failed to provide the necessary modeling data and statistical information to accurately predict toxic responses (e.g., WO 00/12760, WO 00/47761, WO 00/63435, WO 01/32928, and WO 01/38579).

[0005] The pharmaceutical industry spends significant resources to ensure that therapeutic compounds of interest are not toxic to human beings. This process is lengthy as well as expensive and involves testing in a series of organisms starting with rats and progressing to dogs or non-human primates. Moreover, modeling methods for designing candidate pharmaceuticals and their synthesis in nucleic acid, peptide or organic compound libraries has increased the need for inexpensive, fast and accurate methods to predict toxic responses. Toxicity modeling methods based on nucleic acid hybridization platforms would allow the use biological samples from compound-exposed animal or cell culture samples, such as rats or rat hepatocyte cell cultures, to detect human organ toxicity much earlier than has been possible to date.

### SUMMARY OF THE INVENTION

[0006] The invention includes methods of predicting at least one toxic effect of a compound, comprising: detecting the level of expression in a tissue or cell sample exposed to the compound of two or more genes from Tables 1,2, 5 and 6; wherein differential expression of the genes in Tables 1,2, 5 and 6 is indicative of at least one toxic effect. The invention also includes methods of predicting at least one toxic effect of a test compound, comprising: preparing a gene expression profile from a liver cell or tissue sample exposed to the test compound; and comparing the gene expression profile to a database comprising quantitative gene expression information for at least one gene or gene fragment of Tables 1, 2 5 and 6 from a liver cell or tissue sample that has been exposed to at least one toxin and quantitative gene expression information for at least one gene or gene fragment of Tables 1, 2 5 and 6 from a control liver cell or tissue sample exposed to the toxin excipient, thereby predicting at least one toxic effect of the test compound.

[0007] In various aspects, the invention also includes methods of predicting at least one toxic effect of a test agent by comparing gene expression information from agent-exposed samples to a database of gene expression information from toxin-exposed and control samples (vehicle-exposed samples or samples exposed to a non-toxic compound or low levels of a toxic compound). These methods comprise providing or generating quantitative gene expression information from the samples, converting the gene expression information to matrices of fold-change values by a robust multi-array (RMA) algorithm, generating a gene regulation score for each gene that is differentially expressed upon exposure to the test agent by a partial least squares (PLS) algorithm, and calculating a sample prediction score for the test agent. This sample prediction score is then compared to a reference prediction score for one or more toxicity models.

[0008] In various aspects, the invention includes methods of creating a toxicity model. These methods comprise providing or generating quantitative nucleic acid hybridization data for a plurality of genes from at least one cell or tissue sample exposed to a toxin and at least one cell or tissue sample exposed to the toxin vehicle, converting the hybridization data from at least one gene to a gene expression measure, such as fold-change value, by a robust multi-array (RMA) algorithm, generating a gene regulation score from gene expression measure for the at least one gene by a partial least squares (PLS) algorithm, and generating a toxicity reference prediction score for the toxin, thereby creating a toxicity model.

[0009] The invention further provides a set of genes or gene fragments, listed in Table 2, from which probes can be made and attached to solid supports. These core genes serve as a preferred set of markers of liver toxicity and can be used with the methods of the invention to predict or monitor a toxic effect of a compound or to modulate the onset or progression of a toxic response.

[0010] In other aspects, the invention includes a computer system comprising a computer readable medium containing a toxicity model for predicting the toxicity of a test agent and software that allows a user to predict at least one toxic effect of a test agent by comparing a sample prediction score for the test agent to a toxicity reference prediction score for the toxicity model.

[0011] In further aspects of the invention, the gene expression information from test agent-exposed tissues or cells may be prepared transmitted via the Internet for analysis and comparisons to the toxicity models stored on a remote, central server. After processing, the user that sent the text files receives a report indicating the toxicity or non-toxicity of the test agent.

[0012] Tables

[0013] Table 1: Table 1 provides the GLGC identifier (fragment names from Table 2) in relation to the SEQ ID NO. and GenBank Accession number for each of the genes, gene fragments, or proteins listed in Table 2 (all of which are herein incorporated by reference and replicated in the attached sequence listing). The gene names and Unigene cluster titles are also included.

[0014] Table 2: Table 2 presents the PLS weight scores (index scores) for each gene from a series of liver toxicity models.

[0015] Table 3: Table 3 lists the toxins and negative control compounds used to build and train each toxicity model. The designation “1” for a particular compound in a particular model indicates that the compound was used on the toxicity/pathology (tox) side for training the model. The designation “−1” for a particular compound in a particular model indicates that the compound was used on the non-toxicity/no pathology (non-tox) side for training the model. The designation “0” for a particular compound in a particular model indicates that the compound was not used to train that model.

[0016] Table 4: Table 4 provides the protocols used for administration of each toxin to rats and indicates the time points at which rats were sacrificed and tissue samples collected.

[0017] Table 5: Table 5 lists the corresponding human genes or gene fragments, as well as genes and gene fragments of other species, for the genes and gene fragments of Tables 1 and 2. The Unigene cluster titles for these corresponding genes are also included.

[0018] Table 6: Table 6 supplies information concerning the metabolic pathways in which the genes and gene fragments of Tables 1 and 2 function.

### DETAILED DESCRIPTION

[0019] Many biological functions are accomplished by altering the expression of various genes through transcriptional (e.g. through control of initiation, provision of RNA precursors, RNA processing, etc.) and/or translational control. For example, fundamental biological processes such as cell cycle, cell differentiation and cell death are often characterized by the variations in the expression levels of groups of genes.

[0020] Changes in gene expression are also associated with the effects of various chemicals, drugs, toxins, pharmaceutical agents and pollutants on an organism or cells. For example, the lack of sufficient expression of functional tumor suppressor genes and/or the over expression of oncogene/protooncogenes after exposure to an agent could lead to tumorgenesis or hyperplastic growth of cells (Marshall (1991) Cell 64: 313-326; Weinberg (1991) Science 254:1138-1146). Thus, changes in the expression levels of particular genes (e.g. oncogenes or tumor suppressors) may serve as signposts for the presence and progression of toxicity or other cellular responses to exposure to a particular compound.

[0021] Monitoring changes in gene expression may also provide certain advantages during drug screening and development. Often drugs are screened for the ability to interact with a major target without regard to other effects the drugs have on cells. These cellular effects may cause toxicity in the whole animal, which prevents the development and clinical use of the potential drug.

[0022] The present inventors have examined tissue from animals exposed to the known hepatotoxins which induce detrimental liver effects, to identify changes in gene expression induced by these compounds. These changes in gene expression, which can be detected by the production of gene expression profiles, provide useful toxicity markers that can be used to monitor toxicity and/or toxicity progression by a test compound. Some of these markers may also be used to monitor or detect various disease or physiological states, disease progression, drug efficacy and drug metabolism.

[0023] Definitions

[0024] As used herein, “nucleic acid hybridization data” refers to any data derived from the hybridization of a sample of nucleic acids to a one or more of a series of reference nucleic acids. Such reference nucleic acids may be in the form of probes on a microarray or may be in the form of primers that are used in polymerization reactions, such as PCR amplification, to detect hybridization of the primers to the sample nucleic acids. Nucleic hybridization data may be in the form of numerical representations of the hybridization and may be derived from quantitative, semi-quantitative or non-quantitative analysis techniques or technology platforms. Nucleic acid hybridization data includes, but is not limited to gene expression data. The data may be in any form, including florescence data or measurements of florescence probe intensities from a microarray or other hybridization technology platform. The nucleic acid hybridization data may be raw data or may be normalized to correct for, or take into account, background or raw noise values, including background generated by microarray high/low intensity spots, scratches, high regional or overall background and raw noise generated by scanner electrical noise and sample quality fluctuation.

[0025] As used herein, “cell or tissue samples” refers to one or more samples comprising cell or tissue from an animal or other organism, including laboratory animals such as rats or mice. The cell or tissue sample may comprise a mixed population of cells or tissues or may be substantially a single cell or tissue type, such as liver hepatocytes or tissue. Cell or tissue samples as used herein may also be in vitro grown cells or tissue, such as primary cell cultures, immortalized cell cultures, cultured hepatocytes, cultured liver tissue, etc. Cells or tissue may be derived from any organ, including but not limited to, liver, kidney, cardiac, muscle (skeletal or cardiac) or brain.

[0026] As used herein, “test agent” refers to an agent, compound or composition that is being tested or analyzed in a method of the invention. For instance, a test agent may be a pharmaceutical candidate for which toxicology data is desired.

[0027] As used herein, “test agent vehicle” refers to the diluent or carrier in which the test agent is dissolved, suspended in or administered in, to an animal, organism or cells.

[0028] As used herein, “toxin vehicle” refers to the diluent or carrier in which a toxin is dissolved, suspended in or administered in, to an animal, organism or cells.

[0029] As used herein, a “gene expression measure” refers to any numerical representation of the expression level of a gene or gene fragment in a cell or tissue sample. A “gene expression measure” includes, but is not limited to, a fold change value.

[0030] As used herein, “at least one gene” refers to a nucleic acid molecule detected by the methods of the invention in a sample. The term “gene” as used herein, includes fully characterized open reading frames and the encoded mRNA as well as fragments of expressed RNA that are detectable by any hybridization method in the cell or tissue samples assayed as described herein. For instance, a “gene” includes any species of nucleic acid that is detectable by hybridization to a probe in a microarray, such as the “genes” of Table 1. As used herein, at least one gene includes a “plurality of genes.”

[0031] As used herein, “fold change value” refers to a numerical representation of the expression level of a gene, genes or gene fragments between experimental paradigms, such as a test or treated cell or tissue sample, compared to any standard or control. For instance, a fold change value may be presented as microarray-derived florescence or probe intensities for a gene or genes from a test cell or tissue sample compared to a control, such as an unexposed cell or tissue sample or a vehicle-exposed cell or tissue sample. An RMA fold change value as described herein is a non-limiting example of a fold change value calculated by methods of the invention.

[0032] As used herein, “gene regulation score” refers to a quantitative measure of gene expression for a gene or gene fragment as derived from a weighted index score or PLS score for each gene and the fold change value from treated vs. control samples.

[0033] As used herein, “sample prediction score” refers to a numerical score produced via methods of the invention as herein described. For instance, a “sample prediction score” may be calculated using the weighted index score or PLS score for at least one gene in a gene expression profile generated from the sample and the RMA fold change value for that same gene. A “sample prediction score” is derived from summing the individual gene regulation scores calculated for a given sample.

[0034] As used herein, “toxicity reference prediction score” refers to a numerical score generated from a toxicity model that can be used as a cut-off score to predict at least one toxic effect of a test agent. For instance, a sample prediction score can be compared to a toxicity reference prediction score to determine if the sample score is above or below the toxicity reference prediction score. Sample prediction scores falling below the value of a toxicity reference prediction score are scored as not exhibiting at least one toxic effect and sample prediction scores above the value if a toxicity reference prediction score are scored as exhibiting at least one toxic effect.

[0035] As used herein, a log scale linear additive model includes any log scale linear - model such as log scale robust multi-array analysis or RMA (Irizarry et al., Nucleic Acids Research 31(4) e15 (2003).

[0036] As used herein, “remote connection” refers to a connection to a server by a means other than a direct hard-wired connection. This term includes, but is not limited to, connection to a server through a dial-up line, broadband connection, Wi-Fi connection, or through the Internet.

[0037] As used herein, a “CEL file” refers to a file that contains the average probe intensities associated with a coordinate position, cell or feature on a microarray. See the Affymetrix GeneChip® Expression Analysis Technical Manual, which is herein incorporated by reference.

[0038] As used herein, a “gene expression profile” comprises any quantitative representation of the expression of at least one mRNA species in a cell sample or population and includes profiles made by various methods such as differential display, PCR, microarray and other hybridization analysis, etc.

[0039] As used herein, a “general toxicity model” refers to a model that is not limited to a specific pathology or mechanism. This category classifies compounds by their ability to induce toxicity in one or more species, including humans. Compounds that only cause toxicity in the rat are excluded by this definition.

[0040] As used herein, a “necrosis model” refers to a model based on pathology observed in multiple species defined by general cell death via non-energy dependent swelling. See Spraycar, M., ed. Stedman's Medical Dictionary. 26 ed. 1995, Williams & Wilkins: Baltimore.

[0041] As used herein, a “steatosis model,” also referred to as an “adiposis model,” is defined by the accumulation of fat in cell vacuoles as observed in multiple species.

[0042] As used herein, a “macrovesicular steatosis model” is a form of general steatosis (see above), defined by fatty cells that each contain one (or very few) large vesicle that displaces the nucleus as observed in multiple species.

[0043] As used herein, a “microvesicular steatosis model” is a form of general steatosis (see above), defined by fatty cells that each contain numerous small vesicles that do not displace the nucleus as observed in multiple species.

[0044] As used herein, a “cholestasis model” refers to a pathology that results from an impairment in bile flow as observed in multiple species. See Cotran, R. S., V. Kumar, and T. Collins, eds. Pathologic Basis of Disease. 6 ed. 1999, W. B. Saunders Company: Philadelphia.

[0045] As used herein, a “hepatitis model” refers to injury to the liver associated with an influx of acute or chronic inflammatory cells. The pathology is difficult to identify in rats, but is well documented and easily identified in mice and humans. See Fromenty, B., A. Berson, and D. Pessayre, Microvesicular steatosis and steatohepatitis: role of mitochondrial dysfunction and lipid peroxidation. J Hepatol, 1997. 26 Suppl 1: p. 13-22.

[0046] As used herein, a “carcinogenicity model” refers to the capability for induction of tumors in humans or animal models.

[0047] As used herein, a “genotoxic carcinogenicity model” refers to a mechanism by which compounds damage DNA and initiate a cascade of events that lead to tumor formation as observed in multiple species.

[0048] As used herein, a “non-genotoxic carcinogenicity model” refers to a mechanism by which compounds cause tumor formation in the absence of DNA damage as observed in multiple species.

[0049] As used herein, a “rat-specific non-genotoxic carcinogenicity model” refers to a mechanism by which compounds cause tumor formation in the absence of DNA damage. In this case, there is a subset of compounds that only cause this type of tumor formation in a rodent.

[0050] As used herein, a “peroxisome proliferation model” refers to a pathology or mechanism evidenced by an increase in the number of peroxisomes within cells. Humans are refractory to the development of this phenotype.

[0051] As used herein, an “inducer/liver enlargement model” refers to a pathology evidenced by an increase in liver size in general. The liver can increase in size due to either hypertrophy, an increase in size of the cells, or hyperplasia, an increase in cell number as observed in multiple species.

[0052] As used herein, a “human-specific model” refers not to a specific pathology or mechanism, but rather classifies compounds by their absence of toxicity in animal models, but presence of adverse events in human patients.

[0053] Methods of Generating Toxicity Models

[0054] To evaluate and identify gene expression changes that are predictive of toxicity, studies using selected compounds with well characterized toxicity may be used to build a model or database of the present invention. In the present studies, the following hepatotoxins were used to build one or more of the models of the invention: 17-α-ethynylestradiol (EE), 2-acetylaminofluorene (2-AAF), 3-methylcholanthrene, Abacavir, acetaminophen (APAP; paracetamol), acetylsalicylic acid (aspirin), allyl alcohol, Amineptine, Amiodarone, Amitriptyline, ANIT (1-naphthyl isothiocyanate), Eisai (Aricept™), Aroclor 1254, AY-25329, BI compound, Bicalutamide, bromobenzene, Bupropion, Carbamazepine, carbon tetrachloride (CCl₄), Ceftazidime, chloroform, Chlorpheniramine maleate (ChlorTrimeton), CI 1000, Ciprofibrate, Clofibrate, Colchicine, Compound A (AZ), Compound B (AZ), Sulindac, Cyproterone acetate, CZB777, Dantrolene, Demeclocycline, Diclofenac, diethylnitrosamine (DEN), Diflunisal, Diphenhydramine, Diquat, DMN (dimethylnitrosamine), dopamine, Epirubicin, Erythromycin estolate, ethanol, Etoposide, Famotidine (Pepcid AC), Felbamate, Fenofibrate, Flutamide, Gemfibrozil, Gentamicin, Hydrazine (Isoniazid), hydroxyurea, Indomethacin, Labetalol, L-ethionine, LPS (lipopolysaccharide), d-mannitol, Menadione, Metformin, Methapyrilene, Methotrexate, methyldopa, Lovastatin (Mevacor), Monocrotaline, Org 10000, Org 20000, Paraquat, Perhexilene, Phenacetin, phenobarbital, physostigmine, Plicamycin, Rifabutin, Rifampin, Rosiglitazone, Simvastatin, Stavudine, Streptomycin, Tacrine, Tamoxifen, TCDD (2,3,7,8-tetrachlorodibenzo-p-dioxin), Temozolomide, Tetracycline, thioacetamide, Valproate, Wy-14,643, Zidovudine and Zileuton. Methods used to prepare the models of the present invention include an RMA/PLS method (analysis of raw gene expression data by the robust multi-array average algorithm, with evaluation of predictive ability by the partial least squares algorithm).

[0055] In general, the models of the invention are built using cell and tissue samples that are analyzed after exposure to compounds known to exhibit at least one toxic effect. Low doses of these compounds, or the vehicles in which they were prepared, are used as negative controls. Compounds that are known not to exhibit at least one toxic effect may also be used as negative controls. The changes in gene expression levels in samples treated with the compound were considered to represent a specific toxic response, and the genes whose expression was up- or down-regulated upon treatment with the compound were classified as marker genes that may be used as indicators of a specific type of toxic response, i.e., a specific type of liver pathology. These marker genes may also be used to prepare reference gene expression profiles that characterize a specific hepatotoxic response. To train a toxicity model that is initially built from a database of gene expression information classified as showing a toxic response or not showing a toxic response, information from samples treated with some compounds is removed from the model, while information from samples treated with other compounds is retained. If the model with the retained information also retains the ability of the original model to distinguish between a toxic response and the lack of a toxic response in test samples compared to the model, the genes in the training model whose expression is up- or down-regulated are used to build a specific toxicity model. These genes are used on the tox side of the training model.

[0056] The toxins and negative control compounds used to build and train each toxicity model are shown in Table 3. The designation “1” for a particular compound in a particular model indicates that the compound was used on the toxicity/pathology (tox) side for training the model. Where a particular compound in a particular model has the designation of “−1”, the gene expression information from samples treated with that compound is considered to represent the absence of a toxic response or pathology. This information was used on the non-tox side, or negative control side, for training a model to produce a specific toxicity model. The genes analyzed in these samples are considered not to be markers of toxicity. Where a particular compound in a particular model has the designation “0,” the compound was not used to train that model.

[0057] In the present invention, a toxicity study or “tox study” comprises a set of cell or tissue samples that have been exposed to one or more toxins and may include matched samples exposed to the toxin vehicle or a low, non-toxic, dose of the toxin. As described below, the cell or tissue samples may be exposed to the toxin and control treatments in vivo or in vitro. In some studies, toxin and control exposure to the cell or tissue samples may take place by administering an appropriate dose to an animal model, such as a laboratory rat. In some studies, toxin and control exposure to the cell or tissue samples may take place by administering an appropriate dose to a sample of in vitro grown cells or tissue, such as primary rat or human hepatocytes. These samples are typically organized into cohorts by test compound, time (for instance, time from initial test compound dosage to time at which rats are sacrificed), and dose (amount of test compound administered). All cohorts in a tox study typically share the same vehicle control. For example, a cohort may be a set of samples from rats that were treated with acyclovir for 6 hours at a high dosage (100 mg/kg). A time-matched vehicle cohort is a set of samples that serve as controls for treated animals within a tox study, e.g., for 6-hour acyclovir-treated high dose samples the time-matched vehicle cohort would be the 6-hour vehicle-treated samples with that study.

[0058] A toxicity database or “tox database” is a set of tox studies that alone or in combination comprise a reference database. For instance, a reference database may include data from rat tissue and cell samples from rats that were treated with different test compounds at different dosages and exposed to the test compounds for varying lengths of time. A hepatotoxicity database is a set of hepatotoxicity studies that alone or in combination comprise a reference database.

[0059] RMA, or robust multi-array average, is an algorithm that converts raw fluorescence intensities, such as those derived from hybridization of sample nucleic acids to an Affymetrix GeneChip® microarray, into expression values, one value for each gene fragment on a chip (Irizarry et al. (2003), Nucleic Acids Res. 31(4):e15, 8 pp.; and Irizarry et al. (2003) “Exploration, normalization, and summaries of high density oligonucleotide array probe level data,” Biostatistics 4(2): 249-264). RMA produces values on a log2 scale, typically between 4 and 12, for genes that are expressed significantly above or below control levels. These RMA values can be positive or negative and are centered around zero for a fold-change of about 1. A matrix of gene expression values generated by RMA can be subjected to PLS to produce a model for prediction of toxic responses, e.g., a model for predicting liver or kidney toxicity. In a preferred embodiment, the model is validated by techniques known to those skilled in the art. Preferably, a cross-validation technique is used. In such a technique, the data is randomly broken into training and test sets several times until an acceptable model success rate is determined. Most preferably, such technique uses ⅔/⅓ cross-validation, where ⅓ of the data is dropped and the other ⅔ is used to rebuild the model.

[0060] PLS, or Partial Least Squares, is a modeling algorithm that takes as inputs a matrix of predictors and a vector of supervised scores to generate a set of prediction weights for each of the input predictors (Nguyen et al. (2002), Bioinformatics 18:39-50). These prediction weights are then used to calculate a gene regulation score to indicate the ability of each analyzed gene to predict a toxic response. As described in the examples, the gene regulation scores may then be used to calculate a toxicity reference prediction score.

[0061] From the nucleic acid hybridization data, a gene expression measure is calculated for one or more genes whose level of expression is detected in the nucleic acid hybridization value. As described above, the gene expression measure may comprise an RMA fold change value. The toxicity reference score=Σwᵢ R^{FC}^{ᵢ}. “i” is the index number for each gene in a gene expression profile to be evaluated. “wᵢ” is the PLS weight (or PLS score, see Table 2) for each gene. “R^{FC}^{ᵢ}” is the RMA fold-change value for the i^{th} gene, as determined from a normalized RMA matrix of gene expression data from the sample (described above). The PLS weight multiplied by the RMA fold-change value gives a gene regulation score for each gene, and the regulation scores for all the individual genes are added to give a toxicity reference prediction score for a sample or cohort of sample. A toxicity reference prediction score can be calculated from at least one gene regulation score, or at least about 5, 10, 25, 50, 100, 500 or about 1,000 or more gene regulation scores.

[0062] In one embodiment of the invention, a toxicology or toxicity model of the invention is prepared or created by the steps of (a) providing nucleic acid hybridization data for a plurality of genes from at least one liver cell or tissue sample exposed to a toxin and at least one liver cell or tissue sample exposed to the toxin vehicle; (b) converting the hybridization data from at least one gene to a gene expression measure; (c) generating a gene regulation score from gene expression measure for said at least one gene; and (d) generating a toxicity reference prediction score for the toxin, thereby creating a toxicity model. The gene expression measure may be a gene fold change value calculated by a log scale linear additive model such as RMA and the toxicity reference prediction score may be generated with PLS. The toxicity reference prediction score may then be added to a toxicity model or database and be used to predict at least one toxic effect of an unknown test agent or compound.

[0063] In another preferred embodiment, the model is validated by techniques known to those skilled in the art. Preferably, a cross-validation technique is used. In such a technique, the data is randomly broken into training and test sets several times until an acceptable model success rate is determined. Most preferably, such technique uses ⅔/⅓ cross-validation, where ⅓ of the data is dropped and the other ⅔ is used to rebuild the model.

[0064] Methods of Predicting Toxic Effects

[0065] The gene regulation scores and toxicity prediction scores derived from cell or tissue samples exposed to toxins may be used to predict at least one toxic effect, including the hepatotoxicity, renal toxicity or other tissue toxicity of a test or unknown agent or compound. The gene regulation scores and toxicity prediction scores from liver cell or tissue samples exposed to toxins may also be used to predict the ability of a test agent or compound to induce a tissue pathology, such as liver necrosis, in a sample. The toxicology prediction methods of the invention are limited only by the availability of the appropriate toxicity model and toxicology prediction scores. For instance, the prediction methods of a given system, such as a computer system or database of the invention, can be expanded simply by running new toxicology studies and models of the invention using additional toxins or specific tissue pathology inducing agents and the appropriate cell or tissue samples.

[0066] As used, herein, at least one toxic effect includes, but is not limited to, a detrimental change in the physiological status of a cell or organism. The response may be, but is not required to be, associated with a particular pathology, such as tissue necrosis. Accordingly, the toxic effect includes effects at the molecular and cellular level. Hepatotoxicity, for instance, is an effect as used herein and includes but is not limited to the pathologies of: cholestasis, genotoxicity/carcinogenesis, hepatitis, human-specific toxicity, induction of liver enlargement, steatosis, macrovesicular steatosis, microvesicular steatosis, necrosis, non-genotoxic/non-carcinogenic toxicity, peroxisome proliferation, rat non-genotoxic toxicity, and general hepatotoxicity.

[0067] In general, assays to predict the toxicity of a test agent (or compound or multi-component composition) comprise the steps of exposing a liver cell or tissue sample or population of cell or tissue samples to the test agent or compound, providing nucleic acid hybridization data for at least one gene from the test agent exposed cell or tissue sample(s), by, for instant, assaying or measuring the level of relative or absolute gene expression of one or more of the genes, such as one or more of the genes in Table 2, calculating a sample prediction score and comparing the sample prediction score to one or more toxicology reference scores (see Example 1).

[0068] Sample prediction scores may be calculated as follows: sample prediction score=Σwᵢ R^{FC}^{ᵢ}. “i” is the index number for each gene in a gene expression profile to be evaluated. “wᵢ” is the PLS weight (or PLS score) for each gene derived from a toxicity model. “R^{FC}^{ᵢ}” is the RMA fold-change value for the i^{th} gene, as determined from a normalized RMA matrix of gene expression data from the sample (described above). The PLS weight from a given model multiplied by the RMA fold-change value gives a gene regulation score for each gene, and the regulation scores for all the individual genes are added to give a prediction score for the sample.

[0069] Nucleic acid hybridization data may include any measurement of the hybridization, including gene expression levels, of sample nucleic acids to probes corresponding to about 2, 3, 4, 5, 6, 7, 8, 9, 10, 15, 20, 25, 30, 50, 75, 100, 200, 500, 1000 or more genes, or ranges of these numbers, such as about 2-10, about 10-20, about 20-50, about 50-100, about 100-200, about 200-500 or about 500-1000 genes. Nucleic acid hybridization data for toxicity prediction may also include the measurement of nearly all the genes in a toxicity model. “Nearly all” the genes may be considered to mean at least about 80% of the genes in any one toxicity model.

[0070] The methods of the invention to predict at least one toxic effect of a test agent or compound may be practiced by one individual or at one location, or may be practiced by more than one individual or at more than one location. For instance, methods of the invention include steps wherein the exposure of a test agent or compound to a cell or tissue sample(s) is accomplished in one location, nucleic acid processing and the generation of nucleic acid hybridization data takes place at another location and gene regulation and sample prediction scores calculated or generated at another location.

[0071] In another embodiment of the invention, cell or tissue samples are exposed to a test agent or compound by administering the agent to laboratory rats and nucleic acids are processed from selected tissues and hybridized to a microarray to produce nucleic acid hybridization data. The nucleic acid hybridization data is then sent to a remote server comprising a toxicology reference database and software that enables generation of individual gene regulation scores and one or more sample prediction scores from the nucleic acid hybridization data. The software may also enable to user to pre-select specific toxicity models and to compare the generated sample prediction scores to one or more toxicology reference scores contained within a database of such scores. The user may then generate or order an appropriate output product(s) that presents or represents the results of the data analysis, generation of gene regulation scores, sample prediction scores and/or comparisons to one or more toxicology reference scores.

[0072] Data, including nucleic acid hybridization data, may be transmitted to a server via any means available, including a secure direct dial-up or a secure or unsecured internet connection. Toxicology prediction reports or any result of the methods herein may also be transmitted via these same mechanisms. For instance, a first user may transmit nucleic acid hybridization data to a remote server via a secure password protected internet link and then request transmission of a toxicology report from the server via that same internet link.

[0073] Data transmitted by a remote user of a toxicity database or model may be raw, un-normalized data or may be normalized from various background parameters before transmission. For instance, data from a microarray may be normalized for various chip and background parameters such as those described above, before transmission. The data may be in any form, as long as the data can be recognized and properly formatted by available software or the software provided as part of a database or computer system. For instance, microarray data may be provided and transmitted in a cel file or any other common data files produced from the analysis of microarray based hybridization on commercially available technology platforms (see, for instance, the Affymetrix GeneChip® Expression Analysis Technical Manual available at www.affymetrix.com). Such files may or may not be annotated with various information, for instance, but not limited to, information related to the customer or remote user, cell or tissue sample data or information, hybridization technology or platform on which the data was generated and/or test agent data or information.

[0074] Once data is received, the nucleic acid hybridization data may be screened for database compatibility by any available means. In one embodiment, commonly available data quality control metrics can be applied. For instance, outlier analysis methods or techniques may be utilized to identify samples incompatible with the database, for instance, samples exhibiting erroneous florescence values from control probes which are common between the data and the database or toxicity model. In addition, various data QC metrics can be applied, including one or more disclosed in PCT/US03/24160, filed Aug. 1, 2003, which claims priority to U.S. provisional application 60/399,727.

[0075] Cell or Tissue Sample Preparation

[0076] As described above, the cell population that is exposed to the test agent, compound or composition may be exposed in vitro or in vivo. For instance, cultured or freshly isolated liver cells, in particular rat hepatocytes, may be exposed to the agent under standard laboratory and cell culture conditions. In another assay format, in vivo exposure may be accomplished by administration of the agent to a living animal, for instance a laboratory rat.

[0077] Procedures for designing and conducting toxicity tests in in vitro and in vivo systems are well known, and are described in many texts on the subject, such as Loomis et al., Loomis's Esstentials of Toxicology, 4th Ed., Academic Press, New York, 1996; Echobichon, The Basics of Toxicity Testing, CRC Press, Boca Raton, 1992; Frazier, editor, In Vitro Toxicity Testing, Marcel Dekker, New York, 1992; and the like.

[0078] In in vitro toxicity testing, two groups of test organisms are usually employed. One group serves as a control, and the other group receives the test compound in a single dose (for acute toxicity tests) or a regimen of doses (for prolonged or chronic toxicity tests). Because, in some cases, the extraction of tissue as called for in the methods of the invention requires sacrificing the test animal, both the control group and the group receiving compound must be large enough to permit removal of animals for sampling tissues, if it is desired to observe the dynamics of gene expression through the duration of an experiment.

[0079] In setting up a toxicity study, extensive guidance is provided in the literature for selecting the appropriate test organism for the compound being tested, route of administration, dose ranges, and the like. Water or physiological saline (0.9% NaCl in water) is the solute of choice for the test compound since these solvents permit administration by a variety of routes. When this is not possible because of solubility limitations, vegetable oils such as corn oil or organic solvents such as propylene glycol may be used.

[0080] Regardless of the route of administration, the volume required to administer a given dose is limited by the size of the animal that is used. It is desirable to keep the volume of each dose uniform within and between groups of animals. When rats or mice are used, the volume administered by the oral route generally should not exceed about 0.005 ml per gram of animal. Even when aqueous or physiological saline solutions are used for parenteral injection the volumes that are tolerated are limited, although such solutions are ordinarily thought of as being innocuous. The intravenous LD₅₀ of distilled water in the mouse is approximately 0.044 ml per gram and that of isotonic saline is 0.068 ml per gram of mouse. In some instances, the route of administration to the test animal should be the same as, or as similar as possible to, the route of administration of the compound to man for therapeutic purposes.

[0081] When a compound is to be administered by inhalation, special techniques for generating test atmospheres are necessary. The methods usually involve aerosolization or nebulization of fluids containing the compound. If the agent to be tested is a fluid that has an appreciable vapor pressure, it may be administered by passing air through the solution under controlled temperature conditions. Under these conditions, dose is estimated from the volume of air inhaled per unit time, the temperature of the solution, and the vapor pressure of the agent involved. Gases are metered from reservoirs. When particles of a solution are to be administered, unless the particle size is less than about 2 μm the particles will not reach the terminal alveolar sacs in the lungs. A variety of apparati and chambers are available to perform studies for detecting effects of irritant or other toxic endpoints when they are administered by inhalation. The preferred method of administering an agent to animals is via the oral route, either by intubation or by incorporating the agent in the feed.

[0082] When the agent is exposed to cells in vitro or in cell culture, the cell population to be exposed to the agent may be divided into two or more subpopulations, for instance, by dividing the population into two or more identical aliquots. In some preferred embodiments of the methods of the invention, the cells to be exposed to the agent are derived from liver tissue. For instance, cultured or freshly isolated rat hepatocytes may be used.

[0083] The methods of the invention may be used generally to predict at least one toxic response, and, as described in the Examples, may be used to predict the likelihood that a compound or test agent will induce various specific pathologies, such as liver cholestasis, genotoxicity/carcinogenesis, hepatitis, human-specific toxicity, induction of liver enlargement, steatosis, macrovesicular steatosis, microvesicular steatosis, necrosis, non-genotoxic/non-carcinogenic toxicity, peroxisome proliferation, rat non-genotoxic toxicity, general hepatotoxicity, or other pathologies associated with at least one known toxin. The methods of the invention may also be used to determine the similarity of a toxic response to one or more individual compounds. In addition, the methods of the invention may be used to predict or elucidate the potential cellular pathways influenced, induced or modulated by the compound or test agent.

[0084] Databases and Computer Systems

[0085] Databases and computer systems of the present invention typically comprise one or more data structures comprising toxicity or toxicology models as described herein, including models comprising individual gene or toxicology marker weighted index scores or PLS scores (See Table 2), gene regulation scores, sample prediction scores and/or toxicity reference prediction scores. Such databases and computer systems may also comprise software that allows a user to manipulate the database content or to calculate or generate scores as described herein, including individual gene regulation scores and sample prediction scores from nucleic acid hybridization data. The software may also allow the user to compare one or more sample prediction scores to one or more toxicity reference paradigm scores in at least one toxicity model.

[0086] As discussed above, the databases and computer systems of the invention may comprise equipment and software that allow access directly or through a remote link, such as direct dial-up access or access via a password protected Internet link.

[0087] Any available hardware may be used to create computer systems of the invention. Any appropriate computer platform, user interface, etc. may be used to perform the necessary comparisons between sequence information, gene or toxicology marker information and any other information in the database or information provided as an input. For example, a large number of computer workstations are available from a variety of manufacturers. Client/server environments, database servers and networks are also widely available and appropriate platforms for the databases of the invention.

[0088] The databases may be designed to include different parts, for instance a sequence database and a toxicology reference database. Methods for the configuration and construction of such databases and computer-readable media containing such databases are widely available, for instance, see U.S. Publication No. 2003/0171876 (Ser. No. 10/090,144), filed Mar. 5, 2002, PCT Publication No. WO 02/095659, published Nov. 23, 2002, and U.S. Pat. No. 5,953,727, which are herein incorporated by reference in their entirety. In a preferred embodiment, the database is a ToxExpress® or BioExpress™ database marketed by Gene Logic Inc., Gaithersburg, Md.

[0089] The databases of the invention may be linked to an outside or external database such as GenBank (www.ncbi.num.nih.gov/entrez.index.html); KEGG (www.genome.ad.jp/kegg); SPAD (www.grt.kyushu-u.ac.jp/spad/index.html); HUGO (www.gene.ucl.ac.uk/hugo); Swiss-Prot (www.expasy.ch.sprot); Prosite (www.expasy.ch/tools/scnpsit1.html); OMIM (www.ncbi.nlm.nih.gov/omim); and GDB (www.gdb.org). In a preferred embodiment, the external database is GenBank and the associated databases maintained by the National Center for Biotechnology Information (NCBI) (www.ncbi.nlm.nih.gov).

[0090] Any appropriate computer platform, user interface, etc. may be used to perform the necessary comparisons between sequence information, gene expression information and any other information in the database or information provided as an input. For example, a large number of computer workstations are available from a variety of manufacturers, such has those available from Silicon Graphics. Client/server environments, database servers and networks are also widely available and appropriate platforms for the databases of the invention.

[0091] The databases of the invention may be used to produce, among other things, eNortherns™ reports (Gene Logic, Inc) that allow the user to determine the cell type or tissue in which a given gene is expressed and to allow determination of the abundance or expression level of a given gene in a particular tissue or cell.

[0092] Toxicity or Toxicology Reports

[0093] As descried above, the methods, databases and computer systems of the invention can be used to produce, deliver and/or send a toxicity, hepatotoxicity or toxicology report. As consistent with the use of the terms “toxicity” and “toxicology” as used herein, a “toxicity report” and a “toxicology report” are interchangeable.

[0094] The toxicity report of the invention typically comprises information or data related to the results of the practice of a method of the invention. For instance, the practice of a method of identifying at least one toxic effect of a test agent or compound as herein described may result in the preparation or production of a report describing the results of the method. The report may comprise information related to the toxic effects predicted by the comparison of at least one sample prediction score to at least one toxicity reference prediction score from the database. The report may also present information concerning the nucleic acid hybridization data, such as the integrity of the data as well as information inputted by the user of the database and methods of the invention, such as information used to annotate the nucleic acid hybridization data.

[0095] As an exemplary, non-limiting example, a toxicity report of the invention may be in a form such as the reports disclosed in PCT/US02/22701, filed Jul. 18, 2002, which is herein incorporated by reference in its entirety. As described elsewhere in this specification, the report may be generated by a server or computer system to which is loaded nucleic acid hybridization data by a user. The report related to that nucleic acid data may be generated and delivered to the user via remote means such as a password secured environment available over the internet or via available computer communication means such as email.

[0096] Generating Nucleic Acid Hybridization Data

[0097] Any assay format to detect gene expression may be used to produce nucleic acid hybridization data. For example, traditional Northern blotting, dot or slot blot, nuclease protection, primer directed amplification, RT-PCR, semi- or quantitative PCR, branched-chain DNA and differential display methods may be used for detecting gene expression levels or producing nucleic acid hybridization data. Those methods are useful for some embodiments of the invention. In cases where smaller numbers of genes are detected, amplification based assays may be most efficient. Methods and assays of the invention, however, may be most efficiently designed with high-throughput hybridization-based methods for detecting the expression of a large number of genes.

[0098] To produce nucleic acid hybridization data, any hybridization assay format may be used, including solution-based and solid support-based assay formats. Solid supports containing oligonucleotide probes for differentially expressed genes of the invention can be filters, polyvinyl chloride dishes, particles, beads, microparticles or silicon or glass based chips, etc. Such chips, wafers and hybridization methods are widely available, for example, those disclosed by Beattie (WO 95/11755).

[0099] Any solid surface to which oligonucleotides can be bound, either directly or indirectly, either covalently or non-covalently, can be used. A preferred solid support is a high density array or DNA chip. These contain a particular oligonucleotide probe in a predetermined location on the array. Each predetermined location may contain more than one molecule of the probe, but each molecule within the predetermined location has an identical sequence. Such predetermined locations are termed features. There may be, for example, from 2, 10, 100, 1000 to 10,000, 100,000 or 400,000 or more of such features on a single solid support. The solid support, or the area within which the probes are attached may be on the order of about a square centimeter. Probes corresponding to the genes or gene fragments of Table 2 may be attached to single or multiple solid support structures, e.g., the probes may be attached to a single chip or to multiple chips to comprise a chip set. The genes or gene fragments described in the related applications mentioned above may also be attached to these solid supports.

[0100] Oligonucleotide probe arrays for expression monitoring can be made and used according to any techniques known in the art (see for example, Lockhart et al. (1996), Nat Biotechnol 14:1675-1680; McGall et al. (1996), Proc Nat Acad Sci USA 93: 13555-13460). Such probe arrays may contain at least two or more oligonucleotides that are complementary to or hybridize to two or more of the genes or gene fragments described in Table 2. For instance, such arrays may contain oligonucleotides that are complementary to or hybridize to at least about 2, 3, 4, 5, 6, 7, 8, 9, 10, 20, 30, 50, 70, 100, 500 or 1,000 or more of the genes described herein. Preferred arrays contain all, or substantially all, of the genes or gene fragments listed in Table 2. As used herein, “substantially all” of the genes in Table 2 refers to a set of genes or gene fragments containing at least 80% of the genes or gene fragments in Table 2. In another preferred embodiment, arrays are constructed that contain oligonucleotides to detect all or nearly all of the genes in Table 2 on a single solid support substrate, such as a chip.

[0101] The sequences of the genes and gene fragments of Table 2 are in the public databases. Table 1 provides the SEQ ID NO: and GenBank Accession Number (NCBI RefSeq ID) for each of the sequences (see www.ncbi.nlm.nih.gov/), as well as the title for the cluster of which gene is part. The sequences of the genes in GenBank are expressly herein incorporated by reference in their entirety as of the filing date of this application, as are related sequences, for instance, sequences from the same gene of different lengths, variant sequences, polymorphic sequences, genomic sequences of the genes and related sequences from different species, including the human counterparts, where appropriate.

[0102] In addition to gene sequences and fragments, Table 1 also provides protein sequences that correspond to the gene sequences. These proteins can be secreted or non-secreted proteins. Their annotation is based on the databases the proteins are presented. For example, if a protein fragment is linked to a RefSeq nucleotide record, the corresponding RefSeq protein record is used. If a protein fragment is linked to a Swiss-Prot protein record by Gene Index database, this Swiss-Prot protein record is used. A protein fragment could be linked to a Unigene cluster, which may have a list of annotated protein IDs. These protein IDs are produced by NCBI based on the similarity of search between each nucleotide sequence within a Unigene cluster and known protein sequences in GenBank and they may contain paralogous proteins in stead of orthologous ones. Therefore, only those that pass the cutoff score (the sequence percent identity >98% and the alignment sequence length>200) will be incorporated into the final result.

[0103] Certain genes in the commercial database may contain function annotations, which can be used to determine whether they encode secreted proteins. However, the proteins themselves may not have been identified yet. For this reason, in the protein sequence annotation in Table 1, only known protein sequence records are considered and the in-silicon translation from nucleotide sequences to protein sequences is not included.

[0104] Annotation for secreted protein sequences are conducted in several databases. Annotation from the section of “sub-cellular location” in Swiss-Prot database is collected. The following keywords are searched against the text files of the database: “secret,” “extracellular,” “hormone,” “lactation,” “milk,” “bile acid catabolism,” “cytokine,” “IgA-binding protein,” “palmitate,” “pancreas,” “pituitary,” “seminal vesicle,” “thymus,” “Wnt signaling pathway.” All positive results are annotated as secreted proteins for further analysis. In another embodiment, annotation of cellular component and molecular function from Gene Ontology is collected. Annotation for Biological process is ignored because its information is related to a set of genes instead of the gene of interest and thus causes too many false positives. Gene name and RefSeq function summary are collected. The description from InterPro protein family database is also collected. All the members of cytokine gene family (Gene Logic Gene Index database) are flagged as secreted proteins.

[0105] For each record which is annotated as a secreted protein, its description is checked to ensure false positives are removed. For example, GO:000487 is described in the database as having receptor activity when it combines with an extracellular or intracellular messenger to initiate a change in cell activity. Such a characterization would make it a false positive because it is not the protein itself but the combination of the protein and a messenger protein that may make the protein complex behave as a secreted protein. Sometimes, in order to further confirm the result, external database such as NCBI PubMed or even Google is queried.

[0106] As described above, in addition to the sequences of the GenBank Accession Numbers disclosed in the Table 2, sequences such as naturally occurring variant or polymorphic sequences may be used in the methods and compositions of the invention. For instance, expression levels of various allelic or homologous forms of a gene or gene fragment disclosed in Table 2 may be assayed. Any and all nucleotide variations that do not alter the functional activity of a gene or gene fragment listed in Table 2, including all naturally occurring allelic variants of the genes herein disclosed, may be used in the methods and to make the compositions (e.g., arrays) of the invention.

[0107] Probes based on the sequences of the genes described above may be prepared by any commonly available method. Oligonucleotide probes for screening or assaying a tissue or cell sample are preferably of sufficient length to specifically hybridize only to appropriate, complementary genes or transcripts. Typically the oligonucleotide probes will be at least about 10, 12, 14, 16, 18, 20 or 25 nucleotides in length. In some cases, longer probes of at least 30, 40, or 50 nucleotides will be desirable.

[0108] As used herein, oligonucleotide sequences that are complementary to one or more of the genes or gene fragments described in Table 2 refer to oligonucleotides that are capable of hybridizing under stringent conditions to at least part of the nucleotide sequences of said genes. Such hybridizable oligonucleotides will typically exhibit at least about 75% sequence identity at the nucleotide level to said genes, preferably about 80% or 85% sequence identity or more preferably about 90% or 95% or more sequence identity to said genes (see GeneChip® Expression Analysis Manual, Affymetrix, Rev. 3, which is herein incorporated by reference in its entirety).

[0109] Probe Design

[0110] One of skill in the art will appreciate that an enormous number of array designs are suitable for the practice of this invention. The high density array will typically include a number of test probes that specifically hybridize to the sequences of interest. Probes may be produced from any region of the genes or gene fragments identified in Table 2 and the attached representative sequence listing. In instances where the gene reference in the Tables is a gene fragment, probes may be designed from that sequence or from other regions of the corresponding full-length transcript that may be available in any of the sequence databases, such as those herein described. See WO 99/32660 for methods of producing probes for a given gene or genes. In addition, any available software may be used to produce specific probe sequences, including, for instance, software available from Molecular Biology Insights, Olympus Optical Co. and Biosoft International. In a preferred embodiment, the array will also include one or more control probes.

[0111] High density array chips of the invention include “test probes.” Test probes may be oligonucleotides that range from about 5 to about 500, or about 7 to about 50 nucleotides, more preferably from about 10 to about 40 nucleotides and most preferably from about 15 to about 35 nucleotides in length. In other particularly preferred embodiments, the probes are about 20 or 25 nucleotides in length. In another preferred embodiment, test probes are double or single strand DNA sequences. DNA sequences are isolated or cloned from natural sources or amplified from natural sources using native nucleic acid as templates. These probes have sequences complementary to particular subsequences of the genes whose expression they are designed to detect. Thus, the test probes are capable of specifically hybridizing to the target nucleic acid they are to detect.

[0112] In addition to test probes that bind the target nucleic acid(s) of interest, the high density array can contain a number of control probes. The control probes may fall into three categories referred to herein as 1) normalization controls; 2) expression level controls; and 3) mismatch controls.

[0113] Normalization controls are oligonucleotide or other nucleic acid probes that are complementary to labeled reference oligonucleotides or other nucleic acid sequences that are added to the nucleic acid sample to be screened. The signals obtained from the normalization controls after hybridization provide a control for variations in hybridization conditions, label intensity, “reading” efficiency and other factors that may cause the signal of a perfect hybridization to vary between arrays. In a preferred embodiment, signals (e.g., fluorescence intensity) read from all other probes in the array are divided by the signal (e.g., fluorescence intensity) from the control probes thereby normalizing the measurements.

[0114] Virtually any probe may serve as a normalization control. However, it is recognized that hybridization efficiency varies with base composition and probe length. Preferred normalization probes are selected to reflect the average length of the other probes present in the array, however, they can be selected to cover a range of lengths. The normalization control(s) can also be selected to reflect the (average) base composition of the other probes in the array, however in a preferred embodiment, only one or a few probes are used and they are selected such that they hybridize well (i.e., no secondary structure) and do not match any target-specific probes.

[0115] Expression level controls are probes that hybridize specifically with constitutively expressed genes in the biological sample. Virtually any constitutively expressed gene provides a suitable target for expression level controls. Typically expression level control probes have sequences complementary to subsequences of constitutively expressed “housekeeping genes” including, but not limited to the actin gene, the transferrin receptor gene, the GAPDH gene, and the like.

[0116] Mismatch controls may also be provided for the probes to the target genes, for expression level controls or for normalization controls. Mismatch controls are oligonucleotide probes or other nucleic acid probes identical to their corresponding test or control probes except for the presence of one or more mismatched bases. A mismatched base is a base selected so that it is not complementary to the corresponding base in the target sequence to which the probe would otherwise specifically hybridize. One or more mismatches are selected such that under appropriate hybridization conditions (e.g., stringent conditions) the test or control probe would be expected to hybridize with its target sequence, but the mismatch probe would not hybridize (or would hybridize to a significantly lesser extent) Preferred mismatch probes contain a central mismatch. Thus, for example, where a probe is a 20 mer, a corresponding mismatch probe will have the identical sequence except for a single base mismatch (e.g., substituting a G, a C or a T for an A) at any of positions 6 through 14 (the central mismatch).

[0117] Mismatch probes thus provide a control for non-specific binding or cross hybridization to a nucleic acid in the sample other than the target to which the probe is directed. For example, if the target is present the perfect match probes should be consistently brighter than the mismatch probes. In addition, if all central mismatches are present, the mismatch probes can be used to detect a mutation, for instance, a mutation of a gene or gene fragment in Table 2. The difference in intensity between the perfect match and the mismatch probe provides a good measure of the concentration of the hybridized material.

[0118] The terms “background” or “background signal intensity” refer to hybridization signals resulting from non-specific binding, or other interactions, between the labeled target nucleic acids and components of the oligonucleotide array (e.g., the oligonucleotide probes, control probes, the array substrate, etc.). Background signals may also be produced by intrinsic fluorescence of the array components themselves. A single background signal can be calculated for the entire array, or a different background signal may be calculated for each target nucleic acid. In a preferred embodiment, background is calculated as the average hybridization signal intensity for the lowest 5% to 10% of the probes in the array, or, where a different background signal is calculated for each target gene, for the lowest 5% to 10% of the probes for each gene. Of course, one of skill in the art will appreciate that where the probes to a particular gene hybridize well and thus appear to be specifically binding to a target sequence, they should not be used in a background signal calculation. Alternatively, background may be calculated as the average hybridization signal intensity produced by hybridization to probes that are not complementary to any sequence found in the sample (e.g. probes directed to nucleic acids of the opposite sense or to genes not found in the sample such as bacterial genes where the sample is mammalian nucleic acids). Background can also be calculated as the average signal intensity produced by regions of the array that lack any probes at all.

[0119] The phrase “hybridizing specifically to” or “specifically hybridizes” refers to the binding, duplexing, or hybridizing of a molecule substantially to or only to a particular nucleotide sequence or sequences under stringent conditions when that sequence is present in a complex mixture (e.g., total cellular) DNA or RNA.

[0120] As used herein a “probe” is defined as a nucleic acid, capable of binding to a target nucleic acid of complementary sequence through one or more types of chemical bonds, usually through complementary base pairing, usually through hydrogen bond formation. As used herein, a probe may include natural (i.e., A, G, U, C, or T) or modified bases (7-deazaguanosine, inosine, etc.). In addition, the bases in probes may be joined by a linkage other than a phosphodiester bond, so long as it does not interfere with hybridization. Thus, probes may be peptide nucleic acids in which the constituent bases are joined by peptide bonds rather than phosphodiester linkages.

[0121] Forming High Density Arrays

[0122] Methods of forming high density arrays of oligonucleotides with a minimal number of synthetic steps are known. The oligonucleotide analogue array can be synthesized on a single or on multiple solid substrates by a variety of methods, including, but not limited to, light-directed chemical coupling, and mechanically directed coupling (see Pirrung, U.S. Pat. No. 5,143,854).

[0123] In brief, the light-directed combinatorial synthesis of oligonucleotide arrays on a glass surface proceeds using automated phosphoramidite chemistry and chip masking techniques. In one specific implementation, a glass surface is derivatized with a silane reagent containing a functional group, e.g., a hydroxyl or amine group blocked by a photolabile protecting group. Photolysis through a photolithogaphic mask is used selectively to expose functional groups which are then ready to react with incoming 5′ photoprotected nucleoside phosphoramidites. The phosphoramidites react only with those sites which are illuminated (and thus exposed by removal of the photolabile blocking group). Thus, the phosphoramidites only add to those areas selectively exposed from the preceding step. These steps are repeated until the desired array of sequences have been synthesized on the solid surface. Combinatorial synthesis of different oligonucleotide analogues at different locations on the array is determined by the pattern of illumination during synthesis and the order of addition of coupling reagents.

[0124] In addition to the foregoing, additional methods which can be used to generate an array of oligonucleotides on a single substrate are described in PCT Publication Nos. WO 93/09668 and WO 01/23614. High density nucleic acid arrays can also be fabricated by depositing pre-made or natural nucleic acids in predetermined positions. Synthesized or natural nucleic acids are deposited on specific locations of a substrate by light directed targeting and oligonucleotide directed targeting. Another embodiment uses a dispenser that moves from region to region to deposit nucleic acids in specific spots.

[0125] Nucleic Acid Samples

[0126] Cell or tissue samples may be exposed to the test agent in vitro or in vivo. When cultured cells or tissues are used, appropriate mammalian cell extracts, such as liver extracts, may also be added with the test agent to evaluate agents that may require biotransformation to exhibit toxicity. In a preferred format, primary isolates or cultured cell lines of animal or human renal cells may be used.

[0127] The genes which are assayed according to the present invention are typically in the form of mRNA or reverse transcribed mRNA. The genes may or may not be cloned. The genes may or may not be amplified. The cloning and/or amplification do not appear to bias the representation of genes within a population. In some assays, it may be preferable, however, to use polyA+ RNA as a source, as it can be used with less processing steps.

[0128] As is apparent to one of ordinary skill in the art, nucleic acid samples used in the methods and assays of the invention may be prepared by any available method or process. Methods of isolating total mRNA are well known to those of skill in the art. For example, methods of isolation and purification of nucleic acids are described in detail in Chapter 3 of Laboratory Techniques in Biochemistry and Molecular Biology, Vol. 24, Hybridization With Nucleic Acid Probes: Theory and Nucleic Acid Probes, P. Tijssen, Ed., Elsevier Press, New York, 1993. Such samples include RNA samples, but also include cDNA synthesized from a mRNA sample isolated from a cell or tissue of interest. Such samples also include DNA amplified from the cDNA, and RNA transcribed from the amplified DNA. One of skill in the art would appreciate that it is desirable to inhibit or destroy RNase present in homogenates before homogenates are used.

[0129] Biological samples may be of any biological tissue or fluid or cells from any organism as well as cells raised in vitro, such as cell lines and tissue culture cells. Frequently the sample will be a tissue or cell sample that has been exposed to a compound, agent, drug, pharmaceutical composition, potential environmental pollutant or other composition. In some formats, the sample will be a “clinical sample” which is a sample derived from a patient. Typical clinical samples include, but are not limited to, sputum, blood, blood-cells (e.g., white cells), tissue or fine needle biopsy samples, urine, peritoneal fluid, and pleural fluid, or cells therefrom. Biological samples may also include sections of tissues, such as frozen sections or formalin fixed sections taken for histological purposes.

[0130] Hybridization

[0131] Nucleic acid hybridization simply involves contacting a probe and target nucleic acid under conditions where the probe and its complementary target can form stable hybrid duplexes through complementary base pairing. See WO 99/32660. The nucleic acids that do not form hybrid duplexes are then washed away leaving the hybridized nucleic acids to be detected, typically through detection of an attached detectable label. It is generally recognized that nucleic acids are denatured by increasing the temperature or decreasing the salt concentration of the buffer containing the nucleic acids. Under low stringency conditions (e.g., low temperature and/or high salt) hybrid duplexes (e.g., DNA:DNA, RNA:RNA, or RNA:DNA) will form even where the annealed sequences are not perfectly complementary. Thus, specificity of hybridization is reduced at lower stringency. Conversely, at higher stringency (e.g., higher temperature or lower salt) successful hybridization tolerates fewer mismatches. One of skill in the art will appreciate that hybridization conditions may be selected to provide any degree of stringency.

[0132] In a preferred embodiment, hybridization is performed at low stringency, in this case in 6× SSPET at 37° C. (0.005% Triton X-100), to ensure hybridization and then subsequent washes are performed at higher stringency (e.g., 1× SSPET at 37° C.) to eliminate mismatched hybrid duplexes. Successive washes may be performed at increasingly higher stringency (e.g., down to as low as 0.25× SSPET at 37° C. to 50° C.) until a desired level of hybridization specificity is obtained. Stringency can also be increased by addition of agents such as formamide. Hybridization specificity may be evaluated by comparison of hybridization to the test probes with hybridization to the various controls that can be present (e.g., expression level control, normalization control, mismatch controls, etc.).

[0133] In general, there is a tradeoff between hybridization specificity (stringency) and signal intensity. Thus, in a preferred embodiment, the wash is performed at the highest stringency that produces consistent results and that provides a signal intensity greater than approximately 10% of the background intensity. Thus, in a preferred embodiment, the hybridized array may be washed at successively higher stringency solutions and read between each wash. Analysis of the data sets thus produced will reveal a wash stringency above which the hybridization pattern is not appreciably altered and which provides adequate signal for the particular oligonucleotide probes of interest.

[0134] Signal Detection

[0135] The hybridized nucleic acids are typically detected by detecting one or more labels attached to the sample nucleic acids. The labels may be incorporated by any of a number of means well known to those of skill in the art. See WO 99/32660.

[0136] Kits

[0137] The invention further includes kits combining, in different combinations, high-density oligonucleotide arrays, reagents for use with the arrays, signal detection and array-processing instruments, toxicology databases and analysis and database management software described above. The kits may be used, for example, to predict or model the toxic response of a test compound.

[0138] The databases that may be packaged with the kits are described above. In particular, the database software and packaged information may contain the databases saved to a computer-readable medium, or transferred to a user's local server. In another format, database and software information may be provided in a remote electronic format, such as a website, the address of which may be packaged in the kit.

[0139] Databases and software designed for use with microarrays are discussed in Balaban et al., U.S. Pat. No. 6,229,911, a computer-implemented method for managing information collected from small or large numbers of microarrays, and U.S. Pat. No. 6,185,561, a computer-based method with data mining capability for collecting gene expression level data, adding additional attributes and reformatting the data to produce answers to various queries. Chee et al., U.S. Pat. No. 5,974,164, disclose a software-based method for identifying mutations in a nucleic acid sequence based on differences in probe fluorescence intensities between wild type and mutant sequences that hybridize to reference sequences.

[0140] Diagnostic Uses for the Toxicity Markers

[0141] As described above, the genes and gene expression information or portfolios of the genes with their expression information as provided in Tables 1 and 2 may be used as diagnostic markers for the prediction or identification of the physiological state of tissue or cell sample that has been exposed to a compound or to identify or predict the toxic effects of a compound or agent. For instance, a tissue sample such as a sample of peripheral blood cells or some other easily obtainable tissue sample may be assayed by any of the methods described above, and the expression levels from a gene or gene fragment of Table 2 may be compared to the expression levels found in tissues or cells exposed to the toxins described herein. These methods may result in the diagnosis of a physiological state in the cell or may be used to identify the potential toxicity of a compound, for instance a new or unknown compound or agent. The comparison of expression data, as well as available sequence or other information may be done by researcher or diagnostician or may be done with the aid of a computer and databases as described below.

[0142] In another format, the levels of a gene(s) of Table 2, its encoded protein(s), or any metabolite produced by the encoded protein may be monitored or detected in a sample, such as a bodily tissue or fluid sample to identify or diagnose a physiological state of an organism. Such samples may include any tissue or fluid sample, including urine, blood and easily obtainable cells such as peripheral lymphocytes.

[0143] Use of the Markers for Monitoring Toxicity Progression

[0144] As described above, the genes and gene expression information provided in Tables 1 and 2 may also be used as markers for the monitoring of toxicity progression, such as that found after initial exposure to a drug, drug candidate, toxin, pollutant, etc. For instance, a tissue or cell sample may be assayed by any of the methods described above, and the expression levels from a gene or gene fragment of Table 2 may be compared to the expression levels found in tissue or cells exposed to the hepatotoxins described herein. The comparison of the expression data, as well as available sequence or other information may be done by researcher or diagnostician or may be done with the aid of a computer and databases.

[0145] Use of the Toxicity Markers for Drug Screening

[0146] According to the present invention, the genes and gene fragments identified in Tables 1 and 2 may be used as markers or drug targets to evaluate the effects of a candidate drug, chemical compound or other agent on a cell or tissue sample. The genes may also be used as drug targets to screen for agents that modulate their expression and/or activity. In various formats, a candidate drug or agent can be screened for the ability to stimulate the transcription or expression of a given marker or markers or to down-regulate or counteract the transcription or expression of a marker or markers. According to the present invention, one can also compare the specificity of a drug's effects by looking at the number of markers which the drug induces and comparing them. More specific drugs will have less transcriptional targets. Similar sets of markers identified for two drugs may indicate a similarity of effects.

[0147] Assays to monitor the expression of a marker or markers as defined in Tables 1 and 2 may utilize any available means of monitoring for changes in the expression level of the nucleic acids of the invention. As used herein, an agent is said to modulate the expression of a nucleic acid of the invention if it is capable of up- or down-regulating expression of the nucleic acid in a cell.

[0148] In one assay format, gene chips containing probes to one, two or more genes or gene fragments from Table 2 may be used to directly monitor or detect changes in gene expression in the treated or exposed cell. Cell lines, tissues or other samples are first exposed to a test agent and in some instances, a known toxin, and the detected expression levels of one or more, or preferably 2 or more of the genes or gene fragments of Table 2 are compared to the expression levels of those same genes exposed to a known toxin alone. Compounds that modulate the expression patterns of the known toxin(s) would be expected to modulate potential toxic physiological effects in vivo. The genes and gene fragments in Table 2 are particularly appropriate markers in these assays as they are differentially expressed in cells upon exposure to a known hepatotoxin.

[0149] In another format, cell lines that contain reporter gene fusions between the open reading frame and/or the transcriptional regulatory regions of a gene or gene fragment in Table 2 and any assayable fusion partner may be prepared. Numerous assayable fusion partners are known and readily available including the firefly luciferase gene and the gene encoding chloramphenicol acetyltransferase (Alam et al. (1990) Anal Biochem 188:245-254). Cell lines containing the reporter gene fusions are then exposed to the agent to be tested under appropriate conditions and time. Differential expression of the reporter gene between samples exposed to the agent and control samples identifies agents which modulate the expression of the nucleic acid.

[0150] Additional assay formats may be used to monitor the ability of the agent to modulate the expression of a gene identified in Table 2. For instance, as described above, mRNA expression may be monitored directly by hybridization of probes to the nucleic acids of the invention. Cell lines are exposed to the agent to be tested under appropriate conditions and time and total RNA or mRNA is isolated by standard procedures such those disclosed in Sambrook et al. (Molecular Cloning: A Laboratory Manual, Third Ed., Cold Spring Harbor Laboratory Press, Cold Spring Harbor, N.Y., 2001).

[0151] Another embodiment of the present invention provides methods for identifying agents that modulate at least one activity of a protein(s) encoded by the genes or gene fragments in Table 2. Such methods or assays may utilize any means of monitoring or detecting the desired activity.

[0152] In one format, the relative amounts of a protein encoded by a gene of Table 2 between a cell population that has been exposed to the agent to be tested compared to an un-exposed control cell population and a cell population exposed to a known toxin may be assayed. In this format, probes such as specific antibodies are used to monitor the differential expression of the protein in the different cell populations. Cell lines or populations are exposed to the agent to be tested under appropriate conditions and time. Cellular lysates may be prepared from the exposed cell line or population and a control, unexposed cell line or population. The cellular lysates are then analyzed with the probe, such as a specific antibody.

[0153] Agents that are assayed in the above methods can be randomly selected or rationally selected or designed. As used herein, an agent is said to be randomly selected when the agent is chosen randomly without considering the specific sequences involved in the association of the a protein of the invention alone or with its associated substrates, binding partners, etc. An example of randomly selected agents is the use a chemical library or a peptide combinatorial library, or a growth broth of an organism.

[0154] As used herein, an agent is said to be rationally selected or designed when the agent is chosen on a nonrandom basis which takes into account the sequence of the target site and/or its conformation in connection with the agent's action. Agents can be rationally selected or rationally designed by utilizing the peptide sequences that make up these sites. For example, a rationally selected peptide agent can be a peptide whose amino acid sequence is identical to or a derivative of any functional consensus site.

[0155] The agents of the present invention can be, as examples, peptides, small molecules, vitamin derivatives, as well as carbohydrates. Dominant negative proteins, DNAs encoding these proteins, antibodies to these proteins, peptide fragments of these proteins or mimics of these proteins may be introduced into cells to affect function. “Mimic” used herein refers to the modification of a region or several regions of a peptide molecule to provide a structure chemically different from the parent peptide but topographically and functionally similar to the parent peptide (see G. A. Grant in: Molecular Biology and Biotechnology, Meyers, ed., pp. 659-664, VCH Publishers, New York, 1995). A skilled artisan can readily recognize that there is no limit as to the structural nature of the agents of the present invention.

[0156] Without further description, it is believed that one of ordinary skill in the art can, using the preceding description and the following illustrative examples, make and utilize the compounds of the present invention and practice the claimed methods. The following working examples therefore, specifically point out the preferred embodiments of the present invention, and are not to be construed as limiting in any way the remainder of the disclosure.

### EXAMPLES

### Example 1

### Generation of Toxicity Models using RMA and PLS

[0157] Various liver toxins are administered to male Sprague-Dawley rats at various timepoints using administration diluents, protocols, dosing regimes and sampling (sacrifice) time points as previously described in the art, as previously described in the related applications discussed above, and as indicated in Table 4.

[0158] Observation of Animals

[0159] 1. Clinical cage side observations- twice daily mortality and moribundity check. Skin and fur, eyes and mucous membrane, respiratory system, circulatory system, autonomic and central nervous system, somatomotor pattern, and behavior pattern are checked. Potential signs of toxicity, including tremors, convulsions, salivation, diarrhea, lethargy, coma or other atypical behavior or appearance, are recorded as they occur and include a time of onset, degree, and duration.

[0160] 2. Physical Examinations-Prior to randomization, prior to initial treatment, and prior to sacrifice.

[0161] 3. Body Weights-Prior to randomization, prior to initial treatment, and prior to sacrifice.

[0162] Clinical Pathology

[0163] 1. Frequency- Prior to necropsy.

[0164] 2. Number of animals- All surviving animals.

[0165] 3. Bleeding Procedure- Blood was obtained by puncture of the orbital sinus while under 70% CO₂/30% O₂ anesthesia.

[0166] 4. Collection of Blood Samples-Approximately 0.5 mL of blood is collected into EDTA tubes for evaluation of hematology parameters. Approximately 1 mL of blood is collected into serum separator tubes for clinical chemistry analysis. Approximately 200 μL of plasma is obtained and frozen at ˜−80° C. for test compound/metabolite estimation. An additional ˜2 mL of blood is collected into a 15 mL conical polypropylene vial to which ˜3 mL of Trizol is immediately added. The contents are immediately mixed with a vortex and by repeated inversion. The tubes are frozen in liquid nitrogen and stored at ˜−80° C.

[0167] Termination Procedures

[0168] Terminal Sacrifice

[0169] At the time points indicated above, rats are weighed, physically examined, sacrificed by decapitation, and exsanguinated. The animals are necropsied within approximately five minutes of sacrifice. Separate sterile, disposable instruments are used for each animal. Necropsies are conducted on each animal following procedures approved by board-certified pathologists.

[0170] Animals not surviving until terminal sacrifice are discarded without necropsy (following euthanasia by carbon dioxide asphyxiation, if moribund). The approximate time of death for moribund or found dead animals is recorded.

[0171] Postmortem Procedures

[0172] All tissues are collected and frozen within approximately 5 minutes of the animal's death. Tissues are stored at approximately −80° C. or preserved in 10% neutral buffered formalin.

[0173] Tissue Collection and Processing

[0174] Liver

1. Right medial lobe -snap freeze in liquid nitrogen and store at ˜−80° C.
2. Left medial lobe -Preserve in 10% neutral-buffered formalin (NBF) and evaluate for gross and microscopic pathology.
3. Left lateral lobe -snap freeze in liquid nitrogen and store at ˜−80° C.

[0175] Heart

1. A sagittal cross-section containing portions of the two atria and of the two ventricles is preserved in 10% NBF. The remaining heart is frozen in liquid nitrogen and stored at ˜−80° C.

[0176] Kidneys (both)

1. Left—Hemi-dissect; half is preserved in 10% NBF and the remaining half is frozen in liquid nitrogen and stored at ˜−80° C.
2. Right—Hemi-dissect; half is preserved in 10% NBF and the remaining half is frozen in liquid nitrogen and stored at ˜−80° C.

[0177] Testes (both)—A sagittal cross-section of each testis is preserved in 10% NBF. The remaining testes are frozen together in liquid nitrogen and stored at ˜−80° C.

[0178] Brain (whole)—A cross-section of the cerebral hemispheres and of the diencephalon are preserved in 10% NBF, and the rest of the brain is frozen in liquid nitrogen and stored at ˜−80° C.

[0179] Microarray sample preparation is conducted with minor modifications, following the protocols set forth in the Affymetrix GeneChip® Expression Technical Analysis Manual (Affymetrix, Inc. Santa Clara, Calif.). Frozen tissue is ground to a powder using a Spex Certiprep 6800 Freezer Mill. Total RNA is extracted with Trizol (Invitrogen, Carlsbad Calif.) utilizing the manufacturer's protocol. mRNA is isolated using the Oligotex mRNA Midi kit (Qiagen) followed by ethanol precipitation. Double stranded cDNA is generated from mRNA using the SuperScript Choice system (Invitrogen, Carlsbad Calif.). First strand cDNA synthesis is primed with a T7-(dT24) oligonucleotide. The cDNA is phenol-chloroform extracted and ethanol precipitated to a final concentration of 1 μg/ml. From 2 μg of cDNA, cRNA is synthesized using Ambion's T7 MegaScript in vitro Transcription Kit.

[0180] To biotin label the cRNA, nucleotides Bio-11-CTP and Bio-16-UTP (Enzo Diagnostics) are added to the reaction. Following a 37° C. incubation for six hours, impurities are removed from the labeled cRNA following the RNeasy Mini kit protocol (Qiagen). cRNA is fragmented (fragmentation buffer consisting of 200 mM Tris-acetate, pH 8.1, 500 mM KOAc, 150 mM MgOAc) for thirty-five minutes at 94° C. Following the Affymetrix protocol, 55 μg of fragmented cRNA is hybridized on the Affymetrix rat array set for twenty-four hours at 60 rpm in a 45° C. hybridization oven. The chips are washed and stained with Streptavidin Phycoerythrin (SAPE) (Molecular Probes) in Affymetrix fluidics stations. To amplify staining, SAPE solution is added twice with an anti-streptavidin biotinylated antibody (Vector Laboratories) staining step in between. Hybridization to the probe arrays is detected by fluorometric scanning (Hewlett Packard Gene Array Scanner). Data is analyzed using Affymetrix GeneChip® and Expression Data Mining (EDMT) software, the GeneExpress® database, and S-Plus® statistical analysis software (Insightful Corp.).

[0181] Identification of Toxicity Markers and Model Building using RMA and PLS Algorithms

[0182] RMA/PLS models are built as follows. From DNA microarray data from one or more studies, a matrix of RMA fold-change expression values is generated. These values are generated, for example, according to the method of Irizarry et al. (Nucl Acids Res 31(4):e15, 2003), which uses the following equation to produce a log scale linear additive model: T(PMᵢⱼ)=eᵢ+aⱼ+εᵢⱼ. T represents the transformation that corrects for background and normalizes and converts the PM (perfect match) intensities to a log scale. eᵢ represents the log2 scale expression values found on arrays i=1−I, aⱼ represents the log scale affinity effects for probes j=1−J, and εᵢⱼ represents error (to correct for the differences in variances when using probes that bind with different intensities).

[0183] In RMA fold-change matrices, the rows represent individual fragments, and the columns are individual samples. A vehicle cohort median matrix is then calculated, in which the rows represent fragments and the columns represent vehicle cohorts, one cohort for each study/time-point combination. The values in this matrix are the median RMA expression values across the samples within those cohorts. Next, a matrix of normalized RMA expression values is generated, in which the rows represent individual fragments and the columns are individual samples. The normalized RMA values are the RMA values minus the value from the vehicle cohort median matrix corresponding to the time-matched vehicle cohort. PLS modeling is then applied to the normalized RMA matrix (a subset by taking certain fragments as described below), using a −1=non-tox, +1=tox supervised score vector as the dependant variable and the rows of normalized RMA matrix as the independent variables. PLS works by computing a series of PLS components, where each component is a weighted linear combination of fragment values. We use the nonlinear iterative partial least squares method to compute the PLS components.

[0184] To select fragments, a vehicle cohort mean matrix is generated, in which the rows represent fragments and the columns represent vehicle cohorts, one cohort for each study/time-point combination. The values in this matrix are the mean RMA expression values across the samples within those cohorts. A treated cohort mean matrix is then generated, in which the rows represent fragments and the columns represent treated (non-vehicle) cohorts, one cohort for each study/time-point/compound/dose combination. The values in this matrix are the mean RMA expression values across the samples within those cohorts. Next, a treated cohort fold-change matrix is generated, in which the rows represent fragments and the columns represent treated cohorts, one cohort for each study/time-point/compound/dose combination. The values in this matrix are the values in the treated cohort mean matrix minus the values in the vehicle cohort mean matrix corresponding to appropriate time-matched vehicle cohorts. Subsequently, a treated cohort p-value matrix is generated, in which the rows represent fragments and the columns represent treated cohorts, one cohort for each study/time-point/compound/dose combination. The values in this matrix are p-values based on two-sample t-tests comparing the treated cohort mean values to the vehicle cohort mean values corresponding to appropriate time-matched vehicle cohorts. This matrix is converted to a binary coding based on the p-values being less than 0.05 (coded as 1) or greater than 0.05 (coded as 0).

[0185] The row sums of the binary treated cohort p-value matrix are computed, where that row sum represents a “gene regulation score” for each fragment, representing the total number of treated cohorts where the fragment showed differential regulation (up- or down-regulation) compared to its time-matched vehicle cohort. PLS modeling and ⅔/⅓ cross-validation are then performed based on taking the top N fragments according to the regulation score, varying N and the number of PLS components, and recording the model success rate for each combination. N is chosen to be the point at which the cross-validated error rate are minimized. In the PLS model, each of those N fragments receives a PLS weight (PLS score) corresponding to the fragment's utility, or predictive ability, in the model (see Table 2 for lists of PLS weight scores for individual genes and gene fragments in the various hepatotoxicity models). Table 2 presents 13 hepatotoxicity models and includes the gene or gene fragment name for each marker and the corresponding PLS weight or index score for each gene or gene fragment in each model. The models are as follows: General Toxicity, Negative Control, Pharmacologically Active-negative control, Genotoxic Carcinogen, Non-genotoxic/Non-carcinogenic, Rat-specific-non-genotoxic, Cholestasis, Hepatitis, Human-specific Toxicity, Inducer of Liver Enlargement, Peroxisome Proliferator, Microvesicular Steatosis, Macrovesicular Steatosis, General Steatosis and Necrosis.

[0186] To establish a toxicity prediction score cut-off value for a toxicity model, the true-positive and false positive rates for each possible score cut-off value are computed, using the scores from all tox and non-tox samples in the training set. This generates an ROC curve, which is used to set the cut-off score at the point on the ROC curve corresponding to ˜5% false positive rate.

| Model | Cut-off score |
|---|---|
| general | 0.256 |
| cholestasis | 0.146 |
| genotoxictiy/carcinogenesis | 0.197 |
| hepatitis | 0.26 |
| human-specific toxicity | 0.28 |
| inducer of liver enlargement | 0.253 |
| macrovesicular steatosis | 0.168 |
| microvesicular steatosis | 0.227 |
| necrosis | 0.295 |
| non-genotoxicity/non- | 0.166 |
| carcinogenesis | |
| peroxisome proliferation | 0.095 |
| rat non-genotoxicity | 0.147 |
| steatosis | 0.232 |

[0187] The model can be trained by setting a score of −1 for each gene that cannot predict a toxic response and by setting a score of +1 for each gene that can predict a toxic response. Cross-validation of RMA/PLS models may be performed by the compound-drop method and by the ⅔:⅓ method. In the compound-drop method, sample data from animals treated with one particular test compound are removed from a model, and the ability of this model to predict toxicity is compared to that of a model containing a full data set. In the ⅔:⅓ method, gene expression information from a random third of the genes in the model is removed, and the ability of this subset model to predict toxicity is compared to that of a model containing a full data set.

### Example 2

### Methods of Predicting at Least One Toxic Effect of a Test Agent

[0188] To determine whether or not a sample from an animal treated with a test agent or compound exhibits at least one toxic effect or response, RNA is prepared from a cell or tissue sample exposed to the agent and hybridized to a DNA microarray, as described in Example 1 above. From the nucleic acid hybridization data, a prediction score is calculated for that sample and compared to a reference score from a toxicity reference database according to the following equation. The sample prediction score=Σwᵢ R^{FC}^{ᵢ}. “i” is the index number for each gene in a gene expression profile to be evaluated. “wᵢ” is the PLS weight score (or PLS index score, see Table 2 for the lists of PLS scores for each hepatotoxicity model) for each gene. “R^{FC}^{ᵢ}” is the RMA fold-change value for the i^{th} gene, as determined from a normalized RMA matrix of gene expression data from the sample (described above). The PLS weight multiplied by the RMA fold-change value gives a gene regulation score for each gene, and the regulation scores for all the individual genes are added to give a prediction score for the sample.

[0189] As a quality control (QC) check, for each incoming study, an average correlation assessment may be performed. After the RMA matrix is generated (genes by samples), a Pearson correlation matrix is calculated of the samples to each other. This matrix is samples by samples. For each sample row of the matrix, the mean of all correlation values in that row of the matrix, excluding the diagonal is calculated (which is always 1). This mean is the average correlation for that sample. If the average correlation is less than a threshold (for instance 0.90), the sample is flagged as a potential outlier. This process is repeated for each row (sample) in the study. Outliers flagged by the average correlation QC check are dropped out of any downstream normalization, prediction or compound similarity steps in the process.

[0190] In the liver toxicity models of Table 2, the cut-off prediction scores range from about 0.095 to about 0.295, as indicated below. If a sample score, when compared to a particular liver toxicity model, e.g. the cholestasis pathology model, is about 0.146 or above, it can be predicted that the sample shows a toxic response after exposure to the test compound. If the sample score is below 0.146, it can be predicted that the sample does not show a toxic response.

[0191] Compound similarity is assessed in the following way. In the same manner as described above, a cohort fold change vector for each study/time-point/compound/dose combination is calculated. This vector is reduced to only the fragments used in the PLS predictive models. We then calculate Pearson correlations of that cohort fold change vector to each subsetted cohort vector in our reference database. Finally, Pearson correlations are calculated ranked from highest to lowest and the results are stored in the toxicity model and reported.

[0192] A report may be generated comprising information or data related to the results of the methods of predicting at least one toxic effect. The report may comprise information related to the toxic effects predicted by the comparison of at least one sample prediction score to at least one toxicity reference prediction score from the database. The report may also present information concerning the nucleic acid hybridization data, such as the integrity of the data as well as information inputted by the user of the database and methods of the invention, such as information used to annotate the nucleic acid hybridization data. See PCT US02/22701 for a non-limiting example of a toxicity report that may be generated.

[0193] Although the present invention has been described in detail with reference to examples above, it is understood that various modifications can be made without departing from the spirit of the invention. Accordingly, the invention is limited only by the following claims. All cited patents, patent applications and publications referred to in this application are herein incorporated by reference in their entirety.

Lengthy table referenced here
US20110071767A1-20110324-T00001
Please refer to the end of the specification for access instructions.

Lengthy table referenced here
US20110071767A1-20110324-T00002
Please refer to the end of the specification for access instructions.

Lengthy table referenced here
US20110071767A1-20110324-T00003
Please refer to the end of the specification for access instructions.

Lengthy table referenced here
US20110071767A1-20110324-T00004
Please refer to the end of the specification for access instructions.

Lengthy table referenced here
US20110071767A1-20110324-T00005
Please refer to the end of the specification for access instructions.

Lengthy table referenced here
US20110071767A1-20110324-T00006
Please refer to the end of the specification for access instructions.

LENGTHY TABLES
The patent application contains a lengthy table section. A copy of the table is available in electronic form from the USPTO web site (http://seqdata.uspto.gov/?pageRequest=docDetail&DocID=US20110071767A1). An electronic copy of the table will also be available from the USPTO upon request and payment of the fee set forth in 37 CFR 1.19(b)(3).

The application's sequence listing, which the Patent Office published only in electronic form, follows.

SEQUENCE LISTING (2005 sequences)

SEQ ID NO: 1 - DNA, 158 bp, Homo sapiens
accctttgaactagaagctttctattctgaccctcaagcagttccatatccagaagcaaaaatcggccgttttgtcgttcagaatgtttctgcacagaagatggagaaaatctaaagtgaaagtgcgcgtgacacacatgcatttcacatatccgctc

SEQ ID NO: 2 - DNA, 373 bp, Homo sapiens
  misc_feature (100)..(100): n is a, c, g, or t
  misc_feature (115)..(115): n is a, c, g, or t
  misc_feature (150)..(150): n is a, c, g, or t
  misc_feature (357)..(357): n is a, c, g, or t
cagttgataatgttttactatgacttagaactttttcccccaagaacaaaattatttgcataaaaattcaggtatctgaaagactcaaaaggctattttncactttgttcaagtnctgcttccaggcattaagagtgtcgtacagttgtngccactgctgttttccaaatgtccgatgtgtgctgtgactgacaactacttttctttgtgtctgatcgattttgcagtagaccattttagttcttacagcatcaataacaaatgcttcaacatcatcagctccaatctgtagctcttgctgcattgtatcaaaagaaatctctttgttttccactgccattcccataaaggtgaggngtctcattttcgccat

SEQ ID NO: 3 - DNA, 2625 bp, Homo sapiens
tggacttgtactctctcctcggatggctagctgattacttctgtgtagtagcttacaaatgattcgaagtgttgaaactttctgagtctcaatgaactatttctcacacaactcagatactgctgttcatgcatgaattagttgaaccaggccacatagaaagcattgtaattgtacctgtgagttggcaagaagcaagtgctcttccttgattctgctgcacgaggaggagaatgggctgcgatcggaactgtgggctcattactggagccgttattggtgctgtcctggctgtgtttggaggcattctcatgccggttggagacctactcattgagaagacaatcaaaagggaagttgtccttgaagaaggaaccattgctttcaaaaactgggtgaaaacgggcaccactgtgtacagacagttttggatctttgacgtgcaaaacccagaggaagtggcaaagaatagcagcaagatcaaggttaaacagagaggtccttacacatacagagttcgttatttagccaaggaaaatataactcaggaccccaaggacagcactgtctcttttgtacaacccaatggagccatctttgagccttcactgtctgttggaacagagaatgacaacttcacagttctcaatctggctgtggcagctgcaccacatatctacacaaactcatttgttcaaggtgtgctcaacagccttatcaaaaagtccaagtcttctatgttccaaacacgaagtttgaaggaactcttgtggggttacaaagatccattcttgagtttggttccatatcctataagtaccacagttggtgtgttttatccttacaataacactgtagatggagtttataaagttttcaatggaaaggataacataagcaaggttgccataattgatacctataaagggaaaaggaatttgtcctattgggaaagttattgcgacatgattaatggcacagatgcagcctcctttccaccttttgttgagaagtctcgaacactgaggttcttttcctctgacatttgcaggtccatctatgctgtgtttggatctgaagtgaaccttaaaggaatccccgtgtacagatttgttcttccagccaacgcctttgcctccccactccagaacccagacaaccactgtttctgcactgaaaaagtaatctcaaataactgtacgtcgtatggtgtgctggacattggcaagtgcaaagaaggaaagcctgtgtacatttctcttccacatttcctacatgcaagtcctgatgtctcagaacctatcgaaggcttgaatcctaacgaagatgagcataggacatacttggatgtggaacccataactggattcactctacagtttgcaaaacgactgcaggtcaacatactggtcaagccagctagaaaaatagaagcactgaagaatctgaagagaccttacattgtacctatactgtggctaaatgagactgggaccatcggcgatgagaaagcagaaatgttcagaaaccaagtgaccgggaaaataaagctcctgggcctggttgagatggtcttacttggtgttggagtagtgatgtttgttgcttttatgatttcatactgtgcttgcagatctaagaatggaaaataagtagtggatgagcctacattatgcactagctacatttttggtaaaaccaatctccaaaacgaagacttaagacatgcttgtttttataaaacacacctatctgtagttgaagaaacggtggtgtgcgcgctctctctcttattgcagatatatatttatttatatattgcaataagccacagcatatttcgaaaagattaatatgtcactaagcctatattttttaataaaatcttgtattttgttaagtccatcatctgcaactgagtggacatcaatttctgcagaactaattatcttttttggttctgatttactgattttttttcctgttggcaaatttcaagaatgtatatattctaagaaacgctttgttcctcatcgaagtaaactgttatcatgtctggggtggccctttcatttatagcaaatgttccttgtgactgtcagcacatgatatgtcataaggattatatcattttaaagatttaaggatgaaaaatgaacaattcacatatgaaccattgttgatatattgtttaatcctctccctctctggtgtccttggcaacaacaaggccaggtatcacagatacttttttctttttactttcttacacagagcttatatgttctgttcctcgccatgaaatgaactatttttagcacattttagctctttattttaagtatgttgtcaagttccatgctgcctagctcttttgaaaactgagtaggtttttctctttctgctcagccgcaactaatgtaacttcagagagctgttatagtgttaaaagatgtaatttataataaatggattatgatatagaatcttaaaaaagctagaattggctttaaatatgtatttgtggtaatatattctgcttttataatcacccagaaataactggtttctaacattaaagatgttcttaaattcaaaaaaaaaaaaaaaaaaaaaaaaaaaaaa

SEQ ID NO: 4 - DNA, 617 bp, Homo sapiens
tatttaattggaatacatgtcctgccaaccaaaccataaaacacttcatgggaacccatcacacatgaaaccccagcaggaccaacaagtgcggccttgcacttgtcaaggatgctgtagaagaagaaactattgagtttccgtcttaatcctcttcagaacttgaatcatcctcttggtcagaaagttccggcacagggaagcggagaatggcagctactccagtcagctgaccaagctgttccccagacacgtggagactggagaatatccttacggtgcccgcattctctttcacactgtccaccagcctgacataccggctccgggtggccacatcctgatgccggaagagctcatcactgatgagcaaggtgtcaatcgccaaggcttcattggccctctccacctgcttgagtccatagaatgctcggtcaggttcgtgctgtaacattttgtagaagtcatccaaggcttttacttccccggcagctttcgtgtctgaaaggcggctcgctacagtaggatcacataggacctctttcagggagtacctgtgtccagaggaggcgtgtacctgaaggaatttggagccgttttccaggagcaccttgttt

SEQ ID NO: 5 - DNA, 889 bp, Homo sapiens
ggtggctggtggagtgaagctttggtagacatggctcccaacgcgttggctcctgaaccggagcatcccgaaggcatccgggccgtgttgctggggcctcccggggctggcaaggggacccaggcacccaaattggctgagaatttctgtgtctgtcacttggccactggggacatgctgagagcgatggtagcttcaggctcggagctggggaaaaagctgaaggcgacaatggatgccggaaaactggtgagtgatgaaatggtcgtggagctcattgagaagaatttggagactccttcctgcaaaaatggctttcttctagatggcttccctcggactgtgaagcaggctgaaatgcttgatgacctcatggataagaggaaagagaagctcgattcagtcatcgagttcagcatccaggactccctgctgatccggagaatcacgggaaggctgattcaccccaagagtggccggtcctaccatgaggagttcaaccctccaaaggaggccatgaaagatgatatcactggggagcccctgatccgcaggtcagatgacaacgagaaagccttgaagacccgcctggaggcctaccacactcagaccactccgcttgtggaatactacaggaaacggggcattcactgcgccattgatgcgtcccagacccctgacgtggtgtttgcaagcatcctggcagccttctccaaagccacatgtaaagacttggtcatgtttgtctaatgttgggtttgaagggcctcttttcttcctctctgtgaaaggaatggagggtggtcatggttaggtaggtagaaggaacttcctttctcagacagcaaggrcaccttctaatgtactgattaagcacttacttgaaaaa

SEQ ID NO: 6 - DNA, 777 bp, Homo sapiens
  misc_feature (479)..(479): n is a, c, g, or t
  misc_feature (625)..(625): n is a, c, g, or t
aatctagcatgttgcttagaaaggcttgttgtgttgagtacaaatactcctccagcatgtctcctagagaccatttcacccactgctctgtttggctgctagcctcttgtctctctcttcagcaatggtaaggcggattccttttcctcggggaagagaaatccacggtttgttgcccttgccaataacaaaaatgttggaaagacgagtggcaaagctgttgccgttggcatctttcacatgaaccacatcaaaagagccaggatgtctctccctattggtgattacaccaattctccccaagttagcacctccagtcaccatacacaggttcccagtgtcgaacttgatgaaatcagttatcttgcctgtttccaaatcaatctgaatggtgtcattcaccttgatgaggggatcagggtatcgaatagtacgggcatcatgggtcaccagatgtgggattccctttgtgcccacanagatctttctcactttgcacaacttgtacttgggctcctcaggtgtaattcgatgaacagcaaagcgacccttggtgtcatagatcagacggaatttctctccagtcttgtcaatgcggaggacatccataaaaccaacaaggtangttataatcggtccggaattttccatctaaccttaatgaatcgcggcatgcaaatctttttaaatcaacctccagtcaggcaatacttaatcgggtccttaggaaatgattagggcaggattctccacattgtgtggacactgggtgtccag

SEQ ID NO: 7 - DNA, 731 bp, Homo sapiens
  misc_feature (603)..(603): n is a, c, g, or t
gggtacaaaagtatttattttataaaacttgtatttaaaatagagcttatctgtcaactcacaaatcctaatttaaaacataacacattacccttagctaatctgatgttaacctttacaatcaacacccatttttggaattttattaagaacctgtactaaatgaagtttttaatcagaaaacattcccttttaccttaaaagtgcttcttaaatgaaggcaccaacaagaactactttcagatggtacagaatttcttatttcttgaagactctgtggttgaccacttcttcattagttacctgcagcaagacaccttccattttactaccaacaccactgaaggaagcaagaaaagctttattaatgatcacttggcttgcctcagctgttgaaatgaagcactttacagtctttgtggcaccagaatatacttgtccatggttcatatcaatgccatgggaagtgggaaaaactcaatacgggttcctccaccataaccccaattcctccactcctccaggacatagttcctccaacataggtccccccagtccggaacaacaaagttcaccctcatgacccttgtaaaggtgcgctcngccgctcggccaatctggcccaggcaaatcccaaaggggccataatccaacaggcaacgttccggggaatgttccgccaatccaaaaatacgggcaaagtaaccggggccaaagtgcaccacaatgtg

SEQ ID NO: 8 - DNA, 483 bp, Homo sapiens
  misc_feature (358)..(358): n is a, c, g, or t
aaatcataaatgtacaacagcttcttaactctacacacgcacttaaatttttaaaggaaaaacgttatgtcttattacaccatgatcctggctaatagcttttcaaaactttttgagaaaaatcttaaaaaaggtttcacatgtcacctgaaacttacaaatttaacattatcaaagaaggaatgcttctacactcttacaaagaccactagaaagaaccaacatttaaaaggctagaaactgtctcaaagcatttttttttacatccttcctcaacagtaagtattaattatcaatccatcacaaatgctctcgcatcgctctgtgtctccgcatacaatgctattagcatactganataaagttctaaaatgtaattcgaaactgagccgtcggtactcgggctcacactcccaataacaattaccccaggaattagaaaatcaatacggtcttcaaatacccaattccaatcccaaacac

SEQ ID NO: 9 - DNA, 626 bp, Homo sapiens
aaacacaaaaccaaattttatttagcttaacagtttctccaatacaaagagaaatattaaaacccaggacatatgcacatataaccccccgccccacccccaaagcccaaaaacctaagagaagacaggacaaagttctcttcaatggagagcactatcttcgcttctggaaaatgtttccacgccccattccacgtcctcttcctcttgcagccacttgggccttcaggatagcagcttttcctcggccagcccctgagccttggtttttatttttcatgctctttaacatgggtgcatttttcagcatgtcaggcaaaatcagaaaccggatcttgctgccacgtatgtacacctgttccagctgtgccactcggccgtctctgtatgtgactgtgatgttggacatctggcagttcatgttgtcctctgcctcaatgagcttcccccgatacacttcaccagtgttggtctcacatgtcactatgtggccttccgcttcgtgcaggactttaattggcacaccgatagacatcttggcaggactcttccagctaactgcaggcgtgtttttttgtttcggtcccgggacaaacgttagaaggcgaaagcttgaagcgatggaa

SEQ ID NO: 10 - DNA, 1985 bp, Homo sapiens
ggggggctcttcgtcgtgccgccatgatgggccaccgtccagtgctcgtgctcagtcagaatacaaagcgtgagtctggaagaaaagttcaatctggaaatatcaatgctgcaaagacaattgcagacatcatccggacctgtttgggacctaaatctatgatgaagatgcttttggatccaatgggaggcatcgtgatgaccaatgatggtaatgccattcttcgagagattcaagtccagcatcccgcagcaaaatccatgattgaaattagcaggacccaggatgaagaggttggagatgggaccacatcagtaattattcttgctggagaaatgctgtctgtggctgagcacttcctagagcagcagatgcacccaacagtggtgatcagtgcttaccgcatggcactggatgatatggtcagcactctgaagaaaatcagtacccctgttgatgtcaataaccgtgatatgatgttgaacatcatcaatagctctattactacaaaagtcatcagtcggtggtcctctttggcatgcaacattgcactggatgctgttaagactgttcagtttgaagagaatggcagaaaggaaattgatatcaagaagtatgcaagggtggaaaagatacccgggggcatcattgaagactcgtgtgtcttacgtggagttatgatcaacaaggatgtgacccatccaagaatgcgccgctatattaagaatcctcgaattgttctactggattcttctctggagtacaagaaaggagaaagccagactgacattgagattacacgagaggaggatttcacccgcatcctgcaaatggaagaagagtacatccagcagttgtgtgaggatattatccagctgaaacctgacgtagtcatcacagaaaagggcatctcggatttagctcagcactacctcatgcgggccaatgtcacagccattcgtagagtccggaaaacagacaataatcgcattgctagagcctgtggggcacggatagtcagccgacccgaggaactgagagaagatgatgttggtacaggagcaggcttattggaaatcaagaagattggagatgagtacttcacattcatcactgactgcaaagacccaaaggcctgcaccattcttcttagaggagccagcaaagagatactatcggaagtagaacgcaacctccaggatgccatgcaagtgtgccgcaatgttctcctggaccctcagctggtgcctggtggtggagcctctgagatggctgtggcccatgccttgacagaaaaatctaaggccatgactggtgtggaacaatggccatatagggctgtggcccaggctttagaggtcatccctcggaccttgatccagaactgtggggccagtaccattcgtctgcttacctcccttcgggccaagcacacacaggagaattgtgagacctggggtgtgaatggtgagactggtaccttagtggacatgaaagagctgggtatttgggagccattggctgtgaagctacaaacatacaaaacagcagtggagactgcagttctgcttctgcggattgatgacattgtctctggccacaagaagaagggtgatgaccagaaccggcaaaccggtgctccagatgctggccaggagtgagtgctaagcaaggtggctgaaccacagaaccagcagtctcccctttcctgagccagagttccaggaacactgtggacatctttgtttgcaaaggatcaggttgaggggcagcccccagtctgtcccatctcggtttgcaaaaagcactgacgtgtatctcttctgttgtaagcttccattcagtttgcttccagtgattaaatctaagtcatttgaaaaaaaaaaaaaaaaaaaaaaaaaaaaaaaaaaaaaaaaaaaaaaaaaaaaaaaaaaaaaaaaaaaaaaaaaaaaaagaaaaaaaaaaaaaaaaaaaaaaaaaaaaaa

SEQ ID NO: 11 - DNA, 597 bp, Homo sapiens
cagacactatgaattgctttaatggtggtatctgtacaagtgatgtcaggacacaggacagcaaatgcacagtggacatggctagcagacaagctgtgaatgaataaagagttcacactgctcccatgctgtagtgactaagacagctctaagccacctcctcctcagcctcctcctcaaactctccttcctcctcagctgtagcatcctggtactgctggtactcggacaccaggtcattcatgttgctctcaccctcagtgaactccatctcatccatgccctcgcccgtgtaccagtgttggaaggccttgcgtcgggacatggctgtgaactgctctgagatgcgtttgaaaagctccggaaaggccgtgctagttgccaatgaaggtgccgggcatttttaaggcaccgggtggaatgtcacagacagctgttttcacgttgttggggatcaactcgggcaagtaactgctgtccctgttttgggcatttaccatcggtgcggcaccgccttcaataacatgcggcccctgaaaaggtagccactgtcaagtaacgcccatggggggatgagaggagccatcaggtcctaac

SEQ ID NO: 12 - DNA, 599 bp, Homo sapiens
  misc_feature (543)..(543): n is a, c, g, or t
ctaaggcactgggtgtgatgggctcggttctgtggctgctctccctgctgctcagaggcaggcacagacagctcctgcgagcatctctaccaacatctctaggctggagaattaaatactccgattttagcagttggttactctaacaccagctcagcaacctaactgatacaatgtatggtgctacatattaataccaagttcatcaaggcctgtgacgagggttccctttcaacagatgaaagataactctcaacggctgttacaatacttaggaagtgtttgacaatgctttcaattccatcaaatgcctaacaaggcggaaatgtaagactcccttagttttggaaatcagaagagagaaatgttaatccctggacagactgacagttggaaggctactgagctgctaggtgaggcctcaggcatgaggggagcctacagtgagaccacctcatctgctggtggctgctttcccgctgctttcctaggggcagtatcttccctccttaccttgacatagggtggtcatctgcttactanggacacatctggatttcagagaactgttcagtgtggacggaatcacggggacctga

SEQ ID NO: 13 - DNA, 419 bp, Homo sapiens
ggaagacacagttatggggtcaggaaagctcagtgctgtaaactaataggctctctccagctcctgctcatgtctgtttagccttcctagtttacagggagggttgagagtgtgggctcttgtctagcaccacttaaacttgggcagtctgctgattctgacaggtcaggacggggccctgctgttggtctggctaagatgcatgactggctgcttcttcatggtttcaggagccaggccacaggaaattgggcttctggaggcctggggggattctgccgagctgtagggagagcataagtcgctgggtcagcatttgttttaattggggccacccccacaaccacacggtaagatggactcactgctcaggagactccaacactgcggccatgaatgggagggtggatttcccgaaa

SEQ ID NO: 14 - DNA, 567 bp, Homo sapiens
gatgcctgacaattggacaagtccctttctgacaacagaccattatgttgaatcctgcctgcaagacaagctgctcgaattcacttaaggagctggagggcagtgctgaagggggccaggttctcacaggacttaagccaccgctgcacattggtgggcgctgccccactgcttcccccagtctgctggagcacggaccacagcaccacatctgccacagtgagctcattcccaaccaaccacgggcttttccccaaagcggagttcatagagcggaaaacagccgctttttccttactgctcccttctctcagctgaaacatggcgatatccacccagctgtcgatgagggttaggtggacagcgttatgcttctgaccaaatagagagaacaggaagcgtgcgatgttcccttctccttcaatggggcacatcgtttgtacactgaacttcatctgtgtcttgggcacgttcttccaaatcagagtgaagcccagctgatactcgtggcgggactgttttctagcctgctccccgaagcacttgagaagattctcaggtacattc

SEQ ID NO: 15 - DNA, 556 bp, Homo sapiens
gagattatagtaaaagagaatttattctatacactgtctgcctccgtgattttaatatgagaaacgtagtgcttatcaaaaattggttagatacttttttttttttaatatactacacactggattctaacccaatgaatgctggcttcagttttcatctccaatctctttcttgatccagtcaacataattcagtaacttggtgtaaaagccgtatccctcaccacacccaatgccccaggatacgatgcctgtagccacccagatatcacgactgcggtccctgactgcaaaaacacccccactgtccccctggcaggcgtcatgcttgagagttgggtccccagaacagaacatattttgagaaaatacatcattactgtttttcgtccggagccacctctggcatgcctctcgatcggctatgggcagacggacaaacctgagattaaaagctattttatcttctgttatcccgaagccgctgacataacccataaggtctttgtcataaaaggtctcattgtctgggagacagatggggaggaggttggga

SEQ ID NO: 16 - DNA, 582 bp, Homo sapiens
aacgatcaaaaaacactttgcacttataaataaacgcttctttgatcaatattaaatgaaaactacccagaaccttacaggcctttcagcaggcggcagacatgatgttcggaagatagatgttagcttgctgtgatcagaaggatagcgctttgctgtaatttatttaaaatgtacctaacagcttccctcacagtaacttgactgaaattacaacaggaaaagaaacccagcatttattcctaggtttagacataacccacacaaagttccaactatatggcttctatactttttcgtgaaggtgcgcaaaagaaattcggatctcactttagaccaagaatttcagatgcaataaggcaacctctgaagtccaaagttcaatgaatgcacaacagttcaagcagcagataccacctcagaggaaatatttagtttgcttctttgtttccctccagtgttaatcctgctaatgtctgctaaggtcaaccatgactggaacacatgctgctgatccagttgttcaagaccagcctgggcaacacggcgagacactgcctcagaacaaggagtgaaaacaga

SEQ ID NO: 17 - DNA, 500 bp, Homo sapiens
aaataattcgctacaatcctgccacaaattaaagaaaaaattaacatggtattcacagagcagaattctttaggacaatcaaaatcccagagtacttagaataaattaacatcaaattgtgtttatattcagatagcctgattctctcctctgaaatgaaatggagaccattgtaacctagggtgaacgaacacacttgttcttctgtatagacatgaattctttacataaactcaacattaatttgaatcaagttaggaatcctgagaaagtcacccacctacaggcatacaaagacacacacagacagacacacacacagagacagacagacaggcaggcagacacacacacacacacgcacgcaccactcttgagaagcagtgtttctcatggacacttactagaaggtcatttctcagaagggtctaaaattctgaatatttggatgctatcatccccccgcccccaagaaaatcgtcttgtttcaagtgtgacag

SEQ ID NO: 18 - DNA, 613 bp, Homo sapiens
acaatatgcaagagactgattcgtatgttcccagacactctgctgttagtcgcttcctaaagctcttgaaaggcccatctgcctcctttctcttgcgggaatcctgctgctcggtcctgccctgggtaccaccaccaaaccccgttccttcctctgacatcccacagcctgtaacagatggtagagaatttgcgtgaaagctgggtccctggacctctgtatctgtgatctgattacatgaaccagcctttggcgctagccttgggggatggctgctcttctgtgtcacccagtgctcggagcacataagcgcccgcataaaccaggaactgtccggtcacctgggcagcataggatgcgaaccgcagcagactccttaacaaggccttgaagcttgtgcagcggatatcatacgacactgagtacatctcatacatggtggctttgacattgagacagccgaggaagtccttgggattcagcctgtataggtcgaaggtgactctggctattcctgacttctttgtttgtgtgcagacatacttattgcccggtgtccatttctgtcccttttccaagatcatgaagtgtgtgttgtctcttagggtctgaa

SEQ ID NO: 19 - DNA, 1850 bp, Homo sapiens
gcctggctcagaggctaactggcttcgtaggacgcagctgacatcgctgcccagatggcctccaagctgaccccactgaccctcctcctgctgctgctagctggggatagagccttctcagattctgaagtgaccagccacagctcccaggatccactagtagttcaagagggaagcagggacagcgttcctgaaagagatggctcccggagtcccattgagcacacaggacagtcttctacctggccaacaaccagtggatccaccaaaatatcaaatgacaccatggatcaagtagccaacgagtccttcatccagcatgtccaaccagctgctcagctacctgaggattctcccagccagtctcccgtgaattcttccagcccgccctccacagcctcagcccctcccacccaggctccgactgagcccctctgcccagagccacttgcttggtgctctgattcagacagagactcctcagaggctacgttgtcggaggctttgacagatttctctgtgaaactctaccacgccttctcggctacgaagaaggctgagaccaacatggccttttccccattcagcattgctagcctcctcacgcaggtccttcttggggctggagacagcaccaagagcaacttggaggacatcctttcctaccccaaggattttgcctgtgtccaccagacactaaaggctttttcatccaaaggtgtcacttctgtgtctcagattttccacagcccagatctagccatacgggacacctatgtgaacgcctctctgagcctgtatggaagcagccccagagtcctgggtccagacggtgatgctaacttaaaactcatcaacacctgggtggcggagaacaccaaccacaagatcaatgagctgctggacagcctgccctctgacacccgcctcgtccttctcaatgccgtctacttgagtgccaagtggaagaaaacctttgagcaaaagaagatgatggcatctttcctctacaaaaactctatgattaaagtgcccatgttgagtagcaaaaagtaccctctggcccttttcaatgaccagactttgaaggccaaggtgggacagctgcagctctctcacaacctgagctttgtgatcatggtaccccagagcccgacacaccaacttgaagacatggaaaaggcactcaaccccactgtctttaaggccatcctgaagaagctagagctgtccaagtttcagcccacttacgtgatgatgcctcgcattaaagtaaagagcagccaagacatgctgtcaatcatggagaaactggaattctttgacttcacttacgatctcaacctgtgtgggctgactgaggacccagatcttcaggtgtcttccatgaaacacgagacggtgttggaactgacagagacaggtgtggaagcagccgcagcctccaccatctccgtggcccgaaacttactcatctttgaggtgcagcagcctttcctcttcctgctctgggaccagcgacacaagttcccagtcttcatgggccgtgtatatgaccccagggcctgagacaggcaggagtcaggcttgagtaagcactgccacccaagcttcagctcatccagctatttcctcgccactgcctgccctagccacttccagccttaggaactggcagaaggaacagtttccacccaccaacccccatggtattgacatgctctctaaaccactgttttgcagcttttatggttcaagcttaacagagtctacaaataaaacttgcagacacttaaaaaaaaaaaaaaaaaaaaaaaaaaaaaaaaaaaaaaaaaaaaaaaaaaaaaaaa

SEQ ID NO: 20 - DNA, 610 bp, Homo sapiens
tattagaggaaatatctaatggctgtcttatacaaatatcagtttcccaggggcagaacaagatttatctgtgttcgaagttccaggatagatagcaagaggcactgtgctcaaaagtatttgtagtatgaaagggccatcataaatacaaaactgttatcttcggtttctactcacagttgacttaacaattctccgtcccgatgaaaggaaaacagtgtatgaagaatccccaagtagattccaaccgaagccacctggtatttttggagctggtgctcaatgcctcagcttatgcagcacactcagggtatggcagaggcagttaagaaaatgagtcaaatttagcatctcagtactacagtgcgctttgcagaccttcggactatttttcctagccaaagtacaggggaattcagacaagagccaccgctgcagaccactatcccattagtgcaaactctggttcagatactgaagaaacatgttggccaattgaggcaggttctcattgttgggatgcattttagtgtaggaaataaactggcgacggaggcgactcaattctgccaaggtcaagggacgggtaaatcggaggtgctccgtggtg

SEQ ID NO: 21 - DNA, 1278 bp, Homo sapiens
cgccccgcccccacgtgggcttgcgcttttagagcgggagagcgctgtgtcaagaatccgggctcggagcggtggtgagcagcgtctctgagctgaggctgcagcacacaccccaggagcctagactccgtcttagcagactgctgtgttccgccggcccccaccatgcaccaccagtccgttctgcacagtggctactttcacccactgcttcgggcctggcagaccaccccctccaccgtcagtgccaccaacctcatctatcccatctttgtcacggatgttcctgatgatgtccagcccattgccagcctcccgggagtggccaggtatggcgtaaaccagctagaggagatgctgagacctctggtggaagccggccttcgctgtgtcctgatctttggcgtccccagcagagttcccaaggatgaacagggctctgcagctgactcagaggactccccaactattgaggctgtccgtctgctgaggaagaccttccctaccctcctagtggcctgtgatgtctgcctgtgcccctacacctcccatggccactgtggcctcctgagtgaaaatggagccttcctagcagaggaaagccgacaacggttggcagaggtggcactggcctatgccaaggcaggttgtcaggttgtagctccatcagacatgatggatggacgagttgaagccatcaaggctgccctgctaaaacatggacttggcaacagggtctctgtgatgagctatagtgccaaatttgcctcctgtttctatggtcctttccgggatgcagctcagtcaagcccagctttcggagaccgacgctgttatcagctgcctcctggagcccgtggcctggccctccgagcagtggcccgggacattcaagagggagctgacatactcatggtaaagccgggattaccctacctggatatggtgcaggaggtgaaggacaagcaccccgagctccccctcgcagtataccaggtgtccggagagtttgccatgttgtggcacggagccaaggctggggcctttgatctcaggactgctgtactggagtccatgacggccttccgcagagccggtgctgacattatcatcacctactttgcaccccagctgttgaagtggctgaaggaagagtgaaggaaagtgaaggacttggtcttgacagagctccctgggccttacagaagggaaaaagtaaaggcgctgttagaactgtaaaaaaaaaaaaaaaaaaaaaaaaaaaaaaaaaaaaaaaaa

SEQ ID NO: 22 - DNA, 448 bp, Homo sapiens
ccatgcaaggagactgtttatttcgaaaggattttgcaataaacacagtgaacagggctccaagtagctgtctattcttctccctcatcctcgtcctcataggagtctatgcctacttcctcataatctttctccagggcagccatatcctctcgagcctcggaaaactccccctcctccattccctcacccacataccagtgtacaaaagccctcttggcatacatcaagtcaaacttgtggtccaggcgggcccaggcttcagcaatggcggttgtgttgctcagtatgcacactgcacgctgcaccttggccaggtcgcccccaggcaccacggtgggaggctggtacttgataccgaccttgaagcctgtggggcaccagtccacaaactggatgctgcgcttcgtcttgatggcatcgatggcagcgttcacatccttgggca

SEQ ID NO: 23 - DNA, 2569 bp, Homo sapiens
cggcccgcggcggagggaggggaggccgagtcctggaagtggagctccgcgctgggactggttccttcgcagccattttctgtccaaccaaacagccgattggagacgggagccaaccagggctgcattggaggttaaaattggacaaagatccaccacctttaggacaggtgttcaagaaccctgcagataacacaattctgacagtatttcatgacaatggatggcgacagctctacaacagatgcttctcaactagggatttctgcagactacatcggaggaagtcattatgtgatccagccccacgatgatactgaggacagcatgaatgatcatgaagatacaaatggttcaaaagaaagtttcagagaacaagatatttatcttcccattgcaaatgtggctaggataatgaaaaatgccatacctcaaacaggaaagattgcaaaggatgccaaagaatgcgttcaggagtgtgtgagtgagtttataagcttcataacatctgaagcaagtgagcgctgtcaccaggagaagcggaagaccatcaacggggaggacattctgttcgccatgtccactctcggcttcgacagctacgtggagcctctgaaactgtacctccagaagttcagagaggccatgaagggagagaagggcattggtggggccgtgtctgctacagatggactcagcgaggagctcacggaagaggcattcactaaccagttaccggctgggttaataactgcagatggccaacaacaaaacgttatggtttacacgacgtcctatcaacagatttctggtgtccagcagattcagttttcatgatatgaaggaaggatggagccgggctgtgtggagagcgcgagcgagagtctgacggagtctggagcagaggcattgggaggaagtgagagtgaggccgcctccttgtataataagtagctgtaacgtagcttcctgatgcctgactaattgaggtgttaattctgacttgagaatctttttcatgaatgattttaaaagaaaaaaattggattttaaaggtattaaaaatatttttgttttgtacgagagtgtgttgctctgtgacgcctgtatgcattgtatattgcgatttattactgtcagagatttgtagacagtttcttattttcatattgaatcatgttattttgtaattcaagtaagcagctgggttaattcataatgtttattacccttttaataaaatataagggtagagttcattttgaatgaaagttgcctttattacgaatttgcgtttgtcttagctatacactatcctgcatggtaacttagccgaatgtttagcatttatttattgaaaacattttttttttttttttggtaaacagtcatagcttaagcaacgtcatttttttaactgaataattaagttggatgcagaagcaagtgttgcctggcctgtcagacctggtgcctgttgctgtctgtgctgttgaggcagcttccgttactgccatgcctgtgagaattcctttcccttccatacggtcctgccacctctgaaatggcccctttcttcttcaagtatcacagtccccttcctgaagagggagttttcagtccactgatagtcatttcccttcatggaaaggtcaggtccctgtcgggctgtgggagccgagcagtgggcgtggttctgtgcagatgctgcaggtgagagcaagtgagcggaggagcggtgaggcaggggagcagccagcacttggaatcaggagacacggagccttttggtgtgctgtcacaccatctgcagtaagctagcattagttgatgtagcgtggtttcttttttaaagtgaagatttctattttctcatctagtctttttagtaatacttcctttgaatttttgtgtatgtagtgtggtagttttagccctatcaaaaatggcttattgtatagtttgtccagaggaaattttggggctccagtggacaaaagcaagcagttccctaggtccaggctgatcagtaatggccacttgccaagagtcttgtggaacacagctagctactctgagattaaataattcccccttctccttcctcctttccttttcagtagtcaccttctgtgtaggagatgcacatagggaagaacgggaggtgacggtcaagcagaaccagcagtcgtcctactgtgctgaagtaacaatgttaatattttgataactcatttgtccttttactttgctaaatatgtatatttttataaagatgggctcgtgttgtgcacactgttttgtaactcgtttttcacttaatacattgtgaacatctttcccaggtcatgcatgatcttctgcatcatttttactgggtttttattctgttatatgactgaatcatgattaatttatttaattgcctattgcacagtttgacctttttccatctcttcatagttataaacatagttatataagttcactgaatcttgtgtacatcgtaacttttcttgaaataaattcttagaagtagaaaaaaaaaaaaaaaaaaaaaaaaaaaaaa

SEQ ID NO: 24 - DNA, 3700 bp, Homo sapiens
ccaagaggaagaaacatgaagtttttgctgcttagtgcacttttatttttgcatagttccttagcttggacaagagaaaagcattattacatcggaattactgaagcagtttgggactatgcttctggcagtgaagaaaaggaacttatttcagttgacacggaacagtccaatttctatcttcgaaatggtccagatcgtattggaagaaagtataagaaggccctttattctgagtacacagatggcacctttacgaagactatagacaaaccagcctggctagggtttttaggccctgtcatcaaagctgaagttggagacaaagtttctgttcacgtaaagaactttgcctctaggccctacacttttcatgctcatggggtaacttacaccaaggcgaacgagggggccatctaccctgacaacaccactgattttcaaagagccgatgacaaactgtttcctggacagcagtatttgtacgtgctgcgtgccaatgagccaagtcctggcgagggagacagcaattgtgtgaccaggatttaccactctcatgtggatgctccaaaagatattgcatcaggactcataggaccgttgatactctgtaaaaaaggttctctgcataaggaaaaagaggaaaatattgaccaagaattcgtactgatgttctctgtggtggatgaaaatctcagctggtacctagaagataacatcaaaaccttctgctctgaaccagagaaagtcgataaagacaatgaagacttccaggaaagcaacaggatgtactctataaatggatatacatttggaagcctcccagggctctcgatgtgtgcagaagacagagtgaagtggtacctttttgggatggggaatgaagttgacgtgcattcagagctctttcatggtcaagccctgaccagcaagaactatcatactgatataatcaacctgttccctgccactctaattgatgtttctatggtggcccagaatcctggagtctggatgctcagttgccagaacctgaaccatctgaaagctggtttgcaggcctttttccaggttcgtgactgcaacaagccctcaccggacgacgatatccaagacagacatgtgagacattattacatcgctgccgaggagaccatttgggactatgctccgtctgggacagacaccttcactggagagaacttcaccagtctgggaagtgattcaagggtcttttttgagcaaggtgctacaagaattggtggctcttataaaaaattggtttatcgtgagtacacagatgattccttcacaaaccggaaggaaagaggccctgatgaggaacatcttggaatccttggtcctgtcatttgggcagaagtaggagacatcattagagtcacctttcataacaaaggacaatttcctctcagcattcagccaatgggggtaagattcaccaaggaaaatgagggaacatactatggcccagatggccgttcctcaaagcaagcctcccatgtggctcccaaagaaacctttacgtatgaatggactgtccccaaagaaatgggacccacttatgcagatcctgtgtgcctatctaagatgtattattctggagttgacctcaccaaagatatatttactgggcttattgggccaatgaaaatatgcaagaaaggcagcttacttgcagatgggagacagaaagatgtagacaaggagttctacttgtttgcaacagtgtttgatgagaatgagagtttactcttggatgataatatcagaatgttcacaactgcacctgagaatgtggacaaggaagatgaagactttcaggagtccaacaagatgcactccatgaatggattcatgtatggcaatctgcctggcctcaatatgtgcctaggagaatccatcgtgtggtatttgttcagcgctggaaatgaggcagacgtgcatgggatatacttttcaggaaatacctatctgtccaaaggagaaagaagagacactgcaaatctgtttcctcataaaagtctcacccttctcatgacacctgacacagaagggtcttttgatgttgagtgtcttacaacagatcactacaccggcggcatgaagcaaaagtacactgtgaaccagtgcaaggggcagtttgaagatgtcactctctaccagggagaaaggacctactatattgcagcagtggaggtggaatgggattattcaccaagcagggactgggaaatggagctgcaccatttgcaagagcaaaatgtttcaaatgcatttttggataaggaagagtttttcataggctcaaagtacaagaaggttgtgtatcgagagtttactgacagcacattcagagaacaggtgaagagaagagctgaagaggagcacttgggcatgctcggtccactgattcatgcagatgttggagccaaagttaaagttgtctttaaaaatatggcaacaaggccatattcaatacatgcccacggagtgaaaacaaagagttctacagttgctccaacgttgccaggtgaagttcgcacttatatatggcaaattccagaaagatcaggtgctggaacggaggattcaccttgtatcccatgggcttattactcaaccgtggatcgagttaaggatctctacagtgggctaataggcccattgattgtttgtcggaaatcttatgtgaaagtattcaatcctaaaaagaaaatggagttttcccttttgtttctagtttttgatgagaatgaatcttggtacttagatgataacatcaatacataccccgatcaccctgagaaagataacaaagacaacgaggaattcatagaaagcaataaaatgcatgctatcaatgggaaaatgttcggaaacctccaaggtctcacgatgcacgtgggagatgaggtcaactggtatgtgatggctatgggcaatgaaatagacctgcacactgtacacttccacggccacagcttccaatacaagcacaggggaattcatagttctgatgtctttgactttttccctggaacataccaaaccctagaaatgtttccccaaacgcctggaacctggttactccactgccatgtgactgaccatattcatgcggggatggtaactacctacactgttttaccaaatcaagagactaagtctggctgaaagaaataaattggtgataagtggaatacgagcacaatgacgttgttttaaacatttaaaaaaatcaaagccacacaaatgttcatttgtgagggaattggtaatgccgatggacagatgaacagactgtatcatgacatgtatttgtttgctgggtaacagaatcgctttacatagtccacttacacctgcactgaaaggactctgaaaagtggaaaaaaataagcaaaaccgtatgatcagatgctgtccttgactgtcctcacaggatcactataaagtccactaaactgtctccaactcttctcatcaagtcctctaacaaaccatggggtaagagggtatagaaaagaaggaaagatgaagataccaagatgcactttgtaaaaatctgaaaaacagttgaaggatgctctcggaaaatagagaaagtcaggatccaattatgttacattttgaaaaaatgaaatggagataataaagtaataaattttaaaatgccaat

SEQ ID NO: 25 - DNA, 1322 bp, Homo sapiens
ttgtctcaggacatggcgaaactgctagggctcaccctcgtgggactggtgttggcactttacaagaaccatcggtcttcctatcaaacaagattaaatgctttccgtgaagtaacaccggtagatcttcctaactgtactttagttaaaggaatcgaagcgggtgctgaagacttagagattctgcctaatggactaactttctttagcacagggttaaagtatcctggaataaaaagtttcgatcccagtaagcctggaaaaatacttctgatggacttgaatgagaaggagccagcagtgtcagaattagcaattatgggaaatacgttggatatgtcttcatttaaccctcatgggattagcacattcatagatgaagataacactgtgtacctactggtggtaagccacccagactcctcgtccaccgtggaggtgtttaaatttcaagaagaggaaagatcacttttgcatctgaaaaccatcacccatgaacttctgcctagcatcaacgatatagctgctgttggacctgagagcttctatgccacaaatgatcactattttgctgacccatacttacggtcctgggaaatgtacttgggcctgtcatggtccaatgttgtatactacagtccagataaagtccgagtggtagcagatggatttgatttcgctaatggcattggcatttcccttgatggcaagtatgtctatatcgctgaattgctggctcacaagattcacgtgtatgaaaagcatgctaattggactttaacgccattgaaggtcctcagctttgacacccttgtggataacatctctgtggatcctgtgacaggggacctctgggttggatgccatcccaatgggatgaggatttttttctatgactcggagaatcctcctggctcagaggtgcttcggatccagagcattttatccgaagaccccaaagtaactgtagtttatgcagagaatggcacggtgttgcaaggtacgacagtcgctgctgtgtacaaaggaaaactgctgattggaacggtgttccacagagctctttgttgtgacctgtgacaagctggctacacccacatcatggaaagtgaggccatcatttcagccctttgccatattgtaaggtgcctatcacagtgatctccgctcaccaacgaatgttgaccttaatctcagacataagaaggtctgagaatgtttcctggcaatagatcctaactagcaaagatttcttgagtgttagtttcagactacttaaagaccccattacccataaaaaaaaaaatctttcaccaaaaaaa

SEQ ID NO: 26 - DNA, 981 bp, Homo sapiens
aggagttattcatgatgtcagactataattggtttgaaggcataccttttcctgccatatcatatcaaagagaaattttggaagatattcgtaataagtttgtggtgaaagaagaagacttgttgatattaacttaccccaagtcaggaacgaactggctgaatgagattgtatgcttgattcagaccaagggagatccgaagtggatccaaactgtgcccatttgggaccgctcaccctggatagagactgaaataggatatcctgcaataatcaataaggaaggaccacgactcataacctcccatcttcccatccatctcttctccaagtctttcttcagttccaaggccaaggcgatctatctcatgagaaatccgagagatattcttgtgtctggttactttttctggggtaacacaaaccttgtgaagaatccagggtcactcggaacttattttgaatggttcctccaaggaaatgttctattcggatcatggtttgagcatgtccgtggctggctgtccatgagagaatgggacaacttcttggtactatactatgaagacatgaaaaaggatacaaagggaaccataaagaagatctgtgacttcctagggaaaaatttagggccagatgagctggatctcgtcctcaagtacagctccttccaagccatgaaagaaaacaacatgtccaattatagtctcattaaggaagatcgggttactaatggcttgaagctcatgagaaaaggtacaactggggactggaagaatcacttcacagtagcccaagctgaagccttcgataaagttttccaggagaaaatggccggattccccccagggatgttcccatgggaataaattttcaaaacttttgaatattatatgaacactgatgtttatgttcctgttgttctatatcttgaatacctgaatatggtcatagaataaaacctgttgtggaaaaaaaaaa

SEQ ID NO: 27 - DNA, 1523 bp, Homo sapiens
ggcacgagggagcccgaaactggcgcaggcaagaagaacctctagcacagatctagctgactgcgaggttgcagatttggtggaccagcacaatgagagctcggaggggattcatcttactcctgcttctggctgtcctctgttccacaggtgttagcctcagatgctacaactgtttagacccggtttcttcatgcaaaacaaacagcacttgctctcctaacctggatgcttgtcttgttgctgtatccggaaagcaagtctatcaacagtgttggagattttcggattgtaatgccaagttcattttgagccgactagaaatcgcaaacgtacaatacagatgctgccaggcggacttgtgtaacaaaagcttcgaagacaagccaaacaatggggcaatctccctattggggaagacagcgttgctggtgacctcggttctggcggccattttgaagccttgtttctaaatcatctctaagctcccgatgcctcctttcttttttccttctttttcttcttcttcagcactctaaagcctttattattttccaacttatattcgtttaggaaacaatatagttcacttgaaatcttggataagagggagggttgtaagcagcacggaagagcaccgaagagcaccgtgcacatagggaaggcccacctgcaggtacagagtgaagtgcgtgggtaaaacactaacaggttatgtaatcttcctttgtcacttcggagggctggctttcagtttcagcttaagtgggtttccggcaaccctcagggatatctctttggttcccggaatgtagctgaggagtgaggtcagaaagtacctttaagtgagtggaccaggaggattctcttcattactctgacacactcaaaacgctttcataacttttacaggtcctgagctggtgtgcaaatgttccatatgtgagctgtcagtcaggggcgctgattgttcatttgctttaaaacaacaaaaacaaaaacaacaacaaaacagttctgggaatgaaacccagtgcattgagcatgtaggcaagtgctttacccataagccccagctccagctccagcagcgaatgaagcagctgcattttcagctagaaaacatagggatttgacctacatttcaacaagacctctgaaccagatgtgatgatgcttgcttagtatgtttagcatctcagtgctctggaggcagagacaggaggagggccataagttgaaggccagcctgaccttcacagtggtctccaagtcacctaaaactatatagtaagaccttgcctcaaatgaaaaacaaaatggcgagtggtggtgcatgcctttaataccagcacttgggagtagaagcaggtgcatctccgtaggtcaaagccagccagttcccggacagccaaggctatacagagaaagcctgtctatacatacatacatacatacatacatacatacatacatacatacatagaaaagaaaaacctcaaaacaacaataacaacaaaaca

SEQ ID NO: 28 - DNA, 504 bp, Homo sapiens
tttttttttttttttttcctatagcatagtgtttattattccattatgtggaagacagtcaagataaactgctttttcaagatcgaaaaaatgttggccattacagttttctagtaaaagctagcaaagcccaggcaatattcagagatgtgggataattcaggttggagccgcccgtccacacttctacaagaacagacgttttgtgtgtttcctttcttttttgttttgttgttattgttgttttgaggtttttcttttctatgtatgtatgtatgtatgtatgtatgtatgtatgtatgtatgtatagacaggctttctctgtatagccttggctgtccgggaactggctggctttgacctcacggagatgcacctgcttctactcccaagtgctggtattaaaggcatgcaccaccactcgccattttgtttttcatttgaggcaaggtcttactatatagttttaggtgacttggagaccactgtgaaggtcaggctgg

SEQ ID NO: 29 - DNA, 981 bp, Homo sapiens; identical to SEQ ID NO: 26

SEQ ID NO: 30 - DNA, 4775 bp, Homo sapiens
gaattccggattacagacacgtatgtcatatggatgttggagatttgaactcaggtcctcatgtttgggtggtaagtggttctaaccactgagctgtctcaccagtctcagtggggtacccacactgaccactctccgcccactcctgaaatgccctttgttctccccatccctacgctatctctgagagctcacccccatacccttctgttctcacacacagccttccaggcgtctctcagtgcctgccagccgaccccaaggcgaaggagcatgcagtgctcagcccggggagtcctcgaagcgaagacacctgcaccggatgcccctggcctcccgtgaccgcatcatgatgctgggccactcgtgtctttgagtcagtagaagcagatcttcatcagtccacatcaacaccggctaataaggaggaaaccactgccaagctccaggaacaccatgttctgcaggaagttcaaagatctcaagatcacgggggagtgtcctttctccttactggctcctggtcaggttcctacggagccaatagaggaggtggccggagtctctgagagctgccaggccactctgcccacctgccaggagtttgctgagaatgcagaagggagtcacccccaaagaaagacaagccgcaacagagtctacctacacaccctggcagagagtattggcaagctcattttcccagagtttgagagactgaaccttgcacttcagagaacattggcaaagcacaaaataaaggaaaacaggaattcttcagaaaaagaagaccttgaaagaataattgcagaagaagcaattgcggcaggtgtcccagtggaggtgctcaaagactctctgggtgaggaactgttcaagatctgttatgaggaagatgagcacatcctgggcgtggttggcggcaccctgaaggactttctcaacagcttcagcacgctcctgaagcagagcagccactgccaggaggcggagaggcgggggcgactggaagatgcctccatcttgtgcctggacaaggaccaggactttctaaatgtttactacttcttcccgaagagaaccacagccctgcttctccccggtatcattaaagcggctgctcgcatactgtacgaaagccacgtggaggtgtccctgatgcctccctgcttccgaagtgagtgtaccgaattcgtgaaccagccctatttgctctactcggtccacgtgaagagcaccaagccttctctgtccccaggcaaaccccagtcctcgctagtgatccctacttcgctcttctgcaaaactttcccattccacttcatgctggaccgtgacctggccattctgcagctgggtaatggcatcagaaggctggtgaacaagagggacttccaagggaagcccaactttgaagagttctttgaaattctaactcccaaaatcaaccagacatttagcggcatcatgacaatgttgaatatgcagtttgtcatacgggtgaggagatgggataacttagtgaagaaatcttcaagggttatggacctcaaaggtcaaatgatctacatcgttgaatccagtgccatcttgttcttagggtcgccgtgtgtggacagattggaagatttcacaggacggggtctctatctgtctgacatcccgattcataatgccctgagggatgttgtcttgataggggaacaggcacgggctcaagatggcctcaagaagaggttgggaaagctgaaggcaaccttggagcatgcccaccaagccctggaggaggagaagaagaagacggtagatctcctgtgttctatctttccctctgaggttgctcagcagctctggcaaggacaaattgtgcaagccaagaagttcaatgaggtcaccatgctcttctcagatatcgtagggttcactgccatctgctctcagtgttcacctctgcaggtcatcaccatgctcaacgctctctatactcgctttgaccaacagtgtggagagctggatgtctacaaggtggagaccatcggagatgcatattgtgtggcagggggattgcacagagagagtgacacacatgctgtccagatagcactgatggccctgaagatgatggagctctccaatgaggtcatgtctccccacggagaacctatcaagatgcgaatcggactgcattctgggtcagtgtttgctggagttgtcggagtgaagatgccccgatattgcctgtttggaaacaatgtcactctggctaacaaatttgagtcctgcagtgtgcctcggaaaatcaatgtcagccccacgacatacaggttactcaaagactgtcctggctttgtgttcaccccgagatcgagggaggagcttccaccaaacttccctagtgacattcctggaatctgtcactttctggatgcttatcaacatcaaggacctaattctaaaccatggttccagcagaaagatgcagaagatggaaacgctaacttcttaggcaaagcatcaggggtagattagtgagccgcatgtttctgtgtttgatgcctttgaggggtgctcagaatctctgaaatgactttaggattgcagaagataaaaaactgtgttaaaattgcaggggtgaaacccagtttcctctgtttcccatttaagatggaaaaaaaaaagtattcaatgcttcagcgctttcaaccttcttctctatttaagaaacaaacctcaaaagtgacttgtgacttttggggacatagctttgttctagagcagtcactacctgcactcgaaatccaacacagtgtacatattccagacaattgtagtcaagtttaagtgtcaaagtaatgtactcacctgtggcctgtgaccagtgcaaactgtggttattacagtgtgtctgtggtagtgttgcctgtaaatctctgaatagaaatgacagtgtttaattctgcaagagcttccagcctcttgactctacattcaattaggtttccttattctatcctggcgtatgtaacacaataggccagcgccttcttcccagctacatctttgtgcctatgtacgtgttttcctttcctttcctttcctttcctttttttttttaagaaaataagcaattagacataggataaaatgtgatataaagtagttcagtaagtgtcaaagaatattttcatgttttgtcattaaagatattatctatagcacaatatataatacaacaaatacttttcattttgatcctatctgtgataaaacattttaattaatagtaacaatgtactccctactaatccatgtaaaatttactaatagcaaaactttcagagtaaaagtatttacatacattgttaaaatgcaataacattcaaatttaattaaggcatagaattaatatttgcacacagagagcctactgtagaggacagtggcaaagtgttcacaaacacacgtgtttaaatgatcctctactgccgtgttgagccataaaagccaaggggaaaagttttaagttagaagtagaaaaatagacttcattttgtctttttttgataccttcttaagtatttctactgaccatttagtgtatgtgtatgtgttaagaatcaaaatttttattactcagtgtacacctgtgagtattattctactttaaatatactaatattttctacagaaaccactagtatcattgaagaaaatgtctatgatttcattatagagatcctgatacgtttttttttttcttctggagtttaaactaatgtcctttccttcccctgccctcctccgcagtcctctttcttcctctcccattaggcatgtttgtgtgattctgtgggctgacacaggaaactgtgcatgctgggtaaagactgttactgagtaacttcctcaccatgaggcttcagttttattgctaatggtgacagtttacattcccgagtgttaatttggtaaaaggaagtgactttaaaagaagaccaacttcaaagccaagagagatagacataattgaatttttcaatcagtattagtagaacgctagacattctgaatttctatgtgtgtagttgaaaagaaactcagtttaaaagtcattttctacctccaatagtcttcaagcatccagagcaacagacatcttttacctagctctagtttccaagggggacaactaaaccacccaatggatttctttaaaggcggatattgtctcattaaacagtcacactgatgttggatagtgtcacgggccctgcaaaggtgtatttaggatgtcacaatgatgtggaattcaatgaatatttattaaggaggtaaagaggtaaataccccctctttctggaactaatattcaatacaggggaactagtaggaatcacagacaattagaaagcgtaaaacaggatgtcatcctcttaagctgtgcagttaggtggttgctacattagtaataatctgattcagaagcttgcacattaattagaattaattctcccactgtcttttagggatggtgatagaactcaatgacaaagcacctgcctagcatttaggcagtcctgttctgacccaagcagcatgaaggaattacatgtatctctcatgtgcatatgatgtatgatcacactcacctgtgtcacctgtgtacacacctggggcaaatggaggaactgtatctaattcaaggcaaactaccggagctccatgtacggttcctataacttttctattattttgtcattttagcaaaaaaaaaa

SEQ ID NO: 31 - DNA, 454 bp, Homo sapiens
tttttttttttttttttacaggaaggggaagatctttattgcaaagtggagcttatcaaaggaaaaagacacaattctccatgtccttcatttcagcttctgcttctctttctttcatggaatctccaggatgtcactcaaagccagaattgactcttgctctgcgttggaggttcaggaaccttctatgggcaggaggatgtcccctcctcgtgatctctttgggttcatcataaagaaagccaagtagataatcatttcttcgtcggtgggatcttgccatgtccccaaaaatcatcacagagtagcccctttggaaggcgcaggtggagggatcaccagactctcttaggcatgtagtttcctgaacggtgaactctaagttcatgaccagtgtgtcttcatccaggacattaactctcttcagggagctccgcgtcgcccgaaacaggta

SEQ ID NO: 32 - DNA, 472 bp, Homo sapiens
tttttttttttttttttccatttggctctttttattagagaaatcgagaagacagcgagtagggaaatccccatagtgaatggaaccatcacatagatgcctttctggaaccccaaccttctatgatccccaaaagtgtgcttgtgatttcagcaacttacaaaggggagaggaaatactgagaaaggccactatttaataatgaaggagtgaaggtgtctctaaactgggctccaaatctccgtggtggttgtcattgttacctccccttgtatcatcaagttggtgcccttttctgagccttatatctggctctggagtcctggtgcaccccaatcggtgttcggttggctcgttcatgggataccaaagccttccttacaaagtggtctttctttctgtcccttcttcttgggagaatggatttctaagggatggtgagttgaccctccttccgacccaggcaatctgt

SEQ ID NO: 33 - DNA, 504 bp, Homo sapiens
  misc_feature (207)..(207): n is a, c, g, or t
tttttttttttttttttggctgtttaagtcagtgtcttgattcccccacactctgttaaaagaaatcttatgtcatccaagagcatgaaacaggtaattaaactaagtagtacctctttggaataaaagatgtactgttttaaattgtgttgctgtgtgtctatgtgtgggtgtgtgtattccagtgcaggtgaccttggaggctanaggtatttgatctcctggagctggagttctgggcatatgtgcctgtctgaccccttgcgggtactgaacttgggtcctctgctagagcagtcatcttacaagctgagccatcctctggtgcagagacatgttttgttgttgttgtagtttgtttttatgccacagtaccgtggtacatcccacagaggacgcaggcagcagcaccaggagcttcaagatacagaatgccggaggagggcttggattgcggctggcacagggttaagtcttacgaaaaagagcccaacatatgcgaaa

SEQ ID NO: 34 - DNA, 2357 bp, Homo sapiens
gcttccccggagtgagacttcagaaccatttaagtcttgccgcacggtccccggcagcgatggcgcttaaggactatgcgattgagaaagaaaaagtgaagaagttcctgcaagagttttattatgatgatgagcttggaaagaagcagttcaagtatgggacccagttggttcatctggctcatcgggaacaagtggcattgtacgtggacctagatgatgtagctgaagatgaccctgagttggtcgactcaatttgcgagaatgccaagcgctactcgaggctgtttgctgacgtagtacaggagcttctgcctgagtacaaggagaaggaggtggtgaataaggatgtcctggatgtttacattgaacaccgattgatgatggagcagcggagcagagaccctggggcagtccggaaccctcaaaaccagtatccttctgagctcatgcgtagatttgagttgtatttccaaggcccaagtagcagcaagcctcgagtgatccgggaagtacgggctgattctgtagggaaattgttaactgtgcgtgggattgtcactcgtgtgtctgaagtcaagcccaggatggtggtggccacatacacttgcgatcaatgtggggcagagacctaccagccgatccagtctcccaccttcatgcctctgatcatgtgccccagccaggagtgccaaaccaaccgctcaggggggcggctgtacctacagactcgtggctccaaatttattaaattccaggaaatgaagattcaagaacatagtgaccaagttccggtgggaaacatccctcggagcatcacagtggttctagaaggagagaacacaaggattgcccagcctggtgaccatgtcagcgtcactggcatcttcttgccagtcttgcgcacagggttccaacagatggcacagggcttactctcggaaacttacctggaagcccatcgggttgtgaagatgacgaagagcgaggatgatgtgtctggggccggagagctgagtgccgaggagctgaagcagattgccgaggaagatttctatgaaaagctggctgcttctattgctccggagatctatggtcatgaagatgtgaagaaggcgctcttactgctcctggtgggtggtgtggaccagtctcctcaaggcatgaagataagaggaaacatccacatctgccttatgggagatcctggtgtggccaagtctcagctcctgtcttacattgaccgtctggcgccccgaagtcagtacacaacgggccggggctcctctggtgtagggctcacagcagctgtgttgagagactctgtgagtggggaattgaccttagagggtggtgccctggtgctggctgaccagggcgtgtgctgcattgatgagtttgacaagatggcagaagctgaccgcacagccatccatgaggttatggagcagcagaccatctccattgccaaggcaggaattctcaccacactcaatgcccgatgctctatcctggctgctgccaaccctgcctatggacggtataacccccgccgcagtttggagcagaacatacagcttcctgctgctctgctctcccgattcgacctcctctggctgattcaggaccggcccgacagagacaacgacctccggttggcccagcacataacctatgtccaccagcacagccggcagccccctgctcaatttgaacctttggacatgaaacttatgagacggtacattgccatgtgccgcgagaggcagcccacagtgcctgactctctggctgactacatcactgcagcgtatgtggagatgaggcgagaggcccgggccagtaaggatgccacctacacttctgcccggaccctgctggccattctccgactttctactgctctggctcgccttcggatggtagatattgtggagaaggaagatgtgaatgaagccataaggttgatggagatgtcaaaggactcccttctgggtgaaaagggacaaacggctaggacccagaggccagcagatgtgatatttgctaccgtccgtgagttggtatcagggggacggagtgtccgcttttctgaggctgaacagcgctgcatatcacgtggcttcacaccagcccagttccaggcagctctggatgaatatgaggagctaaatgtctggcaggtcaatacttctcggacacggatcacctttgtctgacagccagtttttgagccctactgcctaccccagaaagtttgcgtgatgccccctgagaggacaatttcccatgctgcacttttttattctgccaataaagtgttttgactgccaaaaaaaaaaaaaaaaaaaaaaaaa

SEQ ID NO: 35 - DNA, 2175 bp, Homo sapiens
gcagaaatgcttcgactacccacagtccttcgccagatgagaccagtgtctcgggcactggctcctcatctcactcgggcctatgccaaagatgtaaaatttggtgcggatgctcgagccttaatgcttcaaggtgtagaccttttagccgatgctgtagctgttacaatggggccaaagggaagaacagtgattattgaacagagttggggaagtcccaaagtaacaaaagatggggtcactgttgcaaagtcaattgatttaaaggataaatacaaaaatatcggagctaagcttgttcaggatgttgccaataacacaaatgaagaggctggggatggcaccaccactgccactgttctggcacggtctattgccaaggagggctttgagaagatcagcaaaggggctaatccagtggaaatccggagaggtgtgatgttggctgttgatgctgtaattgctgaacttaagaaacaatctaaacctgtgacaacccctgaagaaattgctcaggttgctacaatttctgcaaacggagacaaagacattgggaacatcatttctgatgcaatgaagaaggttggaagaaagggtgtcatcacagtgaaggatggaaaaaccctgaatgatgagctagaaattattgaaggcatgaagtttgatagaggatatatttccccatattttattaacacatcaaaaggtcaaaaatgtgaattccaagatgcctatgttttgttgagtgaaaagaaaatttctagtgttcagtccattgtacctgctcttgaaattgccaatgctcaccggaagcccttggtcataattgctgaagatgttgatggagaagctcttagcacactggttttgaacaggctaaaagttggtcttcaggttgtagcagtcaaagctccagggtttggggacaacaggaagaaccagcttaaagatatggctatcgctactggtggtgcggtgtttggagaagagggtttgaatctaaatcttgaagatgttcaagctcatgatttagggaaagttggagaggtcatcgtcaccaaagatgatgccatgcttttgaaaggaaaaggtgacaaagctcacattgaaaaacgtattcaagaaatcactgagcagctagacatcaccactagtgaatatgagaaggaaaagctgaacgagcgacttgctaaactctcagatggagtagccgtgttgaaggttggagggacaagtgatgttgaagtgaatgagaagaaagacagagttacagatgctctcaatgctacaagagcagctgttgaagaaggcattgttctaggagggggctgtgctctacttcggtgcatcccagccttggattcattaaagcctgctaatgaagatcagaagataggtatagaaattattaaaagagcacttaaaattcctgcaatgacgattgctaagaatgcaggtgttgaaggatctttgatagttgaaaaaattctgcagagttcctcagaggttggctatgatgccatgcttggagattttgtgaacatggtggaaaagggaatcattgatccaacaaaggttgtaagaactgctttactggatgctgctggggtggcccccctgctaactacagccgaagctgtagtgacagaaattcctaaagaagagaaggaccctggaatgggtgcaatgggtggaatgggagggggtatgggaggtggcatgttctaactcctagaatagtgctttgcccttatcaatgaactgtggcaggaagctcaaggcaggttcctcaccaataacttcagagaagtcacctgaagaaaatgactgaagagaaggctggctgatcactgtaaccatcagttactggtttcctttgacaatacataatggtttactgctgtcattgtccatgcctacagataatttattttgtatttttgaataaagacatttgtacattcctgatgctgggtgcaagagccagtgtcctgctttcaacttaaatcactgaggcatctctactgttctgttagcatcaggactgtagcgctgtgtcaccacatgagaagttcagaagcagcctttctgtggagggtgagaatgattgtgtacagagtagagaagtatccaattatgtgacaacctttgtgtaataaaattttgtttaaagtt

SEQ ID NO: 36 - DNA, 379 bp, Homo sapiens
tcagtttctgaagagaagcaccctgcacagttcttctgagttttggacctaggtctacaaccatgaaggtagcaattatctttcttctcagtgctttggccctgctcaatttagcaggtaacactacagctaaggtgattgggaaaaaggctaattgccctaatacacttattggatgccccagggattatgatcctgtgtgtggtactgacggaaaaacttacgccaatgaatgcattctatgctttgaaaacaggaaatttggaacatctatccgcattcagaggagagggctttgctgaatgtcctgatttcgaaatcttttagggctaccataatgtttagcaagaaggtttgctgaataaatgcatctgaacat

SEQ ID NO: 37 - DNA, 1770 bp, Homo sapiens
gctacaacgccgagcggaggaggtaggaacctgatttccagaagcagctgggtaggcaccatggccgggagcaccaccatcgaggcggtaaagcgcaagatccaggttctgcagcagcaggctgatgatgcggaggagagggccgagcgcctccagcgggaagtggagggagaaaggcgggcccgggagcaggctgaagctgaggtggcctccttgaaccgcaggatccagctggttgaagaggagctggaccgcgcccaggagcgccttgccactgctttgcagaagctggaggaagcagagaaggttgctgatgagagtgagagaggtatgaaggtgattgaaaaccgggctctaaaagatgaagaaaagatggagctccaggaaatccagctgaaggaagcaaagcacattgcagaagaggcagacaggaagtatgaagaggtggctcgtaagttggtgattattgaaggagacttggaacgcacggaggaacgcgccgagctggcagagtcccgttgccgagagatggatgagcagatcagactgatggaccagaacctgaagtgtctgagtgctgctgaagaaaagtactctcaaaaagaagacaagtatgaagaagaaataaagattcttactgataaactcaaggaggcggagacccgggctgagtttgctgaaagatcggtagccaaactggaaaagaccattgatgacttggaagataagctgaagtgcaccaaagaggagcatctctgtacacaaaggatgctggaccagaccctgctggacctgaacgagatgtagaccttccccatccctgccctgccctgcggccgctcctccctctgaccttgactccgcctgaggccagcctccctgaagctggcttgaaactgagggctgatctttttaactgaaggctgctttccctcctgccacccctcttacccctcttgtctttttcatcaaaactgtgtcagcctcttcccagagttccagctggagggtctgaacactctttgggaatcaatatttaagggaatgtgagcacagcgcaaagtgtcctcaatgcagttgtgatatgcacattgtgattactttttgtcttagcaaccattttaacattccaagcacttggcagcttggtgcagcacatcttagcctaatggataccgtctctccatggaggagaaacacaggaatgggcctgcttactgagagccagcagagcccaggcagactccactgtggagacctcagtgctctgtaccaagtcttagccaaacaacagggttctaggaagttagccaaaaacaaaaaccattccggtctgtgaaggaaaacagctttgatatctttgaacaactttacacttatttttagttttgactttttccgtccgatgtgaccaaataggagagtgagacatctgagacgcccccgcctcccagggcccttgtgcatgttaggccagcgtgctaccgttcacccccagccctgagcccgaacttgtctcagctctacccctttcccaactgctcagaaatggatcatgctgccccttagtgttgtggtgacctcttagtgttcacctgccccaagggagacggaaaaggaaattatgtttgtgccactgatttagccacatgaaagtcatctcattgctctttcctgaagctgctgtctctaaagtgccatctctttgtgctttgtatcagtcagtgctggagaaatcttgaatagcttatgtttaaaaaaaaaaaaaaa

SEQ ID NO: 38 - DNA, 451 bp, Homo sapiens
  misc_feature (436)..(436): n is a, c, g, or t
tttttttttttttttttatattaaatgactattttatttacacaccctatcatatccataaataattgcgccctctttgtctgcacaatggttccttgacatctaacgattacagagtgaacatctaaaagtagatgggggcttactccggcttaggacatggtctcttgtgtacactcaatatgcacacccagtaacacagacatagaccagagagggtggctcccagggcctcctgggctcccagcaccaatgggaaaaccttgcccatacacaggtgagttcctgacaactggagaacagagagatgcaggccagggctccgccccacccaccgcagggccccgcccacctctggagcagctccacctttgttcaccctggaaggcatctctttggattgcaaatactttaattcacagaggggatggggtangggctggggtggtgt

SEQ ID NO: 39 - DNA, 425 bp, Homo sapiens
tttttttttttttttttacagtgtaaaagagtaaaacacattttattatatatttttttttctttgaggaaaacagatgtgtgatagaggctgttatgaagtcttgaagggatcaaaactgggcaaggtgttttcaagccagcaagctccagttttgcagaacagctggatgacagtcgccaccagtgaagaccgcattaatacccacaagacagattgcagccgccatcacacacccgagacacagcctcagcagaactgccgggacttccagccctgggaagtaacctcggacggagggagccatcgcatctgggcatgcagtgaagcgggataggtgaaagcggcaggaggaggaagagcatgcgctaactccgctgggtacagagggtacggggcccacacttcacggctactggggtaaa

SEQ ID NO: 40 - DNA, 425 bp, Homo sapiens; identical to SEQ ID NO: 39

SEQ ID NO: 41 - DNA, 533 bp, Homo sapiens
  misc_feature (376)..(376): n is a, c, g, or t
tttttttttttttttttggtggtttggaattcttttctcttttgttaaaagaggggtaggaaatggggaccaggtacccctgggctctgggaaacaggcatgcagggaacccttgcaggcaggggctgggtagaagagtcctggagtttcccataatccttcgcaggaaacagcaatgctggcagataaggaggtggagtgaggcagggcccttcaaacaacagggtggcgggccaaggggcttggggctcactctaacatgcaaagtccagctgccccataaactaggttgcttttgaagagcgacatacgtataaatacataagacacagctacacgcacacatgcggagaaggctctgcattcccaagggtanggatctaggcctactggccccaagacaggagtcatcatgtgtctgccaccaagtgattctctgaaacactccaggtggtggggccaggcaggtaagtcttcgttgggatggctgcttggtctccaaggtgctgcccactaggcacccaagccacttt

SEQ ID NO: 42 - DNA, 546 bp, Homo sapiens
  misc_feature (516)..(516): n is a, c, g, or t
tttttttttttttttttaaataaaaagccacaaatttattgtaaatctagaagtaccagaacgtcactcatacagatcagcgatcctgtggtggttttcgtttttgttttccccacccttcccaacattggcacccctgattgttgacagactgaaaaggacacacgttttcctgtctcatgcagtagacgagagcagacccctcagaaaccagttataaatattaaaccatctcgaacattcgtagtacaaaatcgcttgtaaagtgctaaagtcagataacacctgcaaaccgaccctcgagcctagagcatttatttctcgggggcagccccacagagcttgccacatccatctcatttcactcgagtctgctctttcggacagacacgttgtcttccagtcactcgccctcccccaagttttacagattgtcctactagttctatggctgataagatgctgtattaaacgtggcgggtggtgacgcacctcaccacttccgtctcagtgcanagaagagattcaagcttgtgtgtacctgta

SEQ ID NO: 43 - DNA, 371 bp, Homo sapiens
tttttttttttttttttaagagcttagaaaatttatttttttcttgaaatgacacacatgggcagggaggtaggacttggtgtaggttggtggaaaccgtgtcccccagcatcccagttttcctctcagttctttgatgagaggtctcctaaagactgggaggcggagcggagagctcccagttctaagcttggaatctaacttgaagtgcggagggtatggggatgtggtgggagccatgggactttgttctctggtaaaaccaaaaaatcaaaacaacaaaactccgagtcagctcggggatacttaatttgcatattggatgctgggtttcaggaaggatgttgtgtgttggtccttgcctcgtgccg

SEQ ID NO: 44 - DNA, 1946 bp, Homo sapiens
ccggggtcgggccaggtcgctgctgctctggccatggctgaggcacgcacgtctcgctggtactttggagggctggcttcctgcggagctgcctgctgcacgcaccctctagacctgctcaaggtgcatttgcagacccaacaggaggtgaagcttcgaatgactggaatggcactgcaggtggtgcgaaccgatggcttcctggcactctacaatggcctgagtgcctcgctgtgcaggcagatgacctactccctgacccggttcgctatctacgagaccatgcgggactacatgaccaaggacagccaggggcctctccccttctacagcaaggtgttgctgggcggcatcagtggtttaactggaggcttcgtggggaccccagcagatttggtcaatgtcaggatgcagaatgacatgaagctgcctctgagccagcgccgcaactactctcacgccctggatggtctgtaccgtgtagcccgtgaagaaggcctgaagaagctcttctctggagcaactatggcatccagccgtggggccctcgtcactgtgggccagctgtcctgctacgaccaggccaagcagctggttctcagtactgggtacctgagtgacaacattttcacccacttcctctccagtttcattgcgggcggatgtgccacatttctctgccagcccctggacgtgctgaagactcgcttgatgaactccaagggcgagtatcagggtgttttccattgtgccgtggagacagcaaagcttggaccacaggcctttttcaagggtctcgttcctgcgggcgtccgtctcgtcccccacaccgtgcttaccttcatgttcctggagcagctgcggaagcacttcggtatcaaagtggcaacctgacaccgccagggacacctgggctgcgctcagtcgctgtgctgagccccttggaagagtaggaagggagtgggctcccttcctccttggcctgggcccgtgctgatccccagaagattcctgttcttcccacccttgggctgctggctacgccttccgaccctgccttggccccactgaagtggcacctctgccctactggctcccaggctctccccactgggacgtcccatcttcctacccgatgattcactcagaagaggtctggcctggctggtgtcactgtccccacctccctggctgctaccctgccctgcctgtcaagcccggagaagctgagtacacttcctgctcttgctggcccactgaacagcttccacccaggacttgggtagtgtggcagggtacagcccctggcagcttctgcttaccaaatgactagagcacgcacgcacacacatacacacatgcacttacgtcacaagagggaccaccgtgcagtgttctggaaggtagtgccttcaggagagggaacagggcagcagcacagatcaccagcaaacgccatgaccgcggagtccggagaaagtacctggggttccctgtgcacctcccgtgctcagccttggctgctttaagagtcagtttttgcggaaccctcctactcagcagccactaccatcatcaggaactggctgtgtccctcatacacctgtgccctcccttgcctggcttcccccagggccaggggctcatgctggagctggggctatgatggattcattttatgtgtcctcctaggacctgttttcccgtatggcaggggtcacccctcaccatccctcagggttcaaagcagcctgttttccctcaaattggggttgtgtgtatatcaacgtgaggttgggccctgtgcccgtttgcctcccctcagcaccaggccctcacccaggaggtgcgggaggtggcagtgggcccaggggcactgcctacatctctcttcaggatctaataaaccaagtggccaaaaaaaaaaaaaaaaaaaaaaaaaaaaa

SEQ ID NO: 45 - DNA, 455 bp, Homo sapiens
  misc_feature (384)..(384): n is a, c, g, or t
tttttttttttttttttgggatacagaaatagttttattttcttaatgcagcacagtagacatacaatcgattattccctagagtgtgcaatataaattattcacattaaaaaattaacgacaaagcctgatatgcgggaaatattaaaaacatacacctaatttttatgtgttctgactgcggacatggctagctttataaatctgaataaataggacatggcgcacagtggcttgagtatagacgggcctgctccaggtgtagtgagaacccactctccactttggtcatcgagattccccgtggcagcgtggggcggctctgaaacacttctggcactccagggagggcgtctcgggcgctccccctactctcccttgtancgagggggtcttttctccttgaaagcaagaagaccttccagtctgtccttcgttgagatggtctgagcata

SEQ ID NO: 46 - DNA, 483 bp, Homo sapiens
  misc_feature (414)..(414): n is a, c, g, or t
tttttttttttttttttcaagctccatcaacttttactttcatgagtaggagagtgggggtcagctgttcgattctgtgcccaggacagcaattgctgcctggcgcccactctctatacagtcattgacagctaccccctcataggaggccccagccaaagtcaggggcaacctctgggccgtcaggaattgcagagctgagtctagtttttgccagtggcctagtgtatactgagggatacagtttttgtgtagatggaccaagcaatggcttggttgctctttcagtcctaactgtgtggcagccgcttcctgtgctgctcgttggaatagctctggagacaattcatggccattggctttcagcttctgtaaccagtaacctcccaacatcacagtcagtctgaggcctgnggggttcccatcctgctcaggaaaagcaaccgagtcatacacgattcccaggacggtcgggtcttctga

SEQ ID NO: 47 - DNA, 483 bp, Homo sapiens; identical to SEQ ID NO: 46
  misc_feature (414)..(414): n is a, c, g, or t

SEQ ID NO: 48 - DNA, 477 bp, Homo sapiens
tttttttttttttttttgacaggtacacaattttatttaacagcatttaaagtccacctcagaagagggacaccagagaattctttttttttttcatttaataaatacaaatgaataaaaatactttgttttgtacagagaccgcctctcctctcttcctcccccgcttgcttgccaggaagggctgaggatggcaacatgccctgtggccgctctgcatgggcatctccccacacagaccgcttctcacagagagggcttcatctcagtggcctacaatactatttcggtacaatcccctcctcctgcacctaccaacaccagactcttgcctttcaaacagaccgactcccctgggagaaggaaagcacaggcccccacaggtgcccgcctggagccccatagctggggactcgtgacaccatgggacatgcacgctggccactgacatgtgggcacgggacagaagcagacagt

SEQ ID NO: 49 - DNA, 937 bp, Homo sapiens
ccgcgcggccgcctccgcggctcccggaacgcagaagctggtgtagggaggcgggcagtgaaggctccgaggcttgttcacattcggggaagcagaaaattgcctcatagttactaacctaacatggctgaccagaggcagcgctcactctctacttccggggaatcgttataccatgttcttggactggacaagaatgcaacctcagatgacattaaaaagtcctatcggaagctggccctgaaatatcaccctgacaagaaccctgataacccagaggctgcagacaagtttaaggagattaacaacgcccacgcaatcctgacagacgccacgaaaagaaacatttatgacaagtatggctcgctggggctctatgtggctgagcaatttggggaggagaatgtcaacacctacttcgtactctccagctggtgggccaaggcgctgttcgtcgtctgtggcctcctcacctgctgctactgctgctgctgtttatgctgttgctttaactgctgctgtgggaagtgcaagcccaaggcacctgagggtgaagagacagaattctacgtatcccctgaagacttggaggcacagctgcagtctgatgagagggaggctacagacacaccgatcgtcatacagccagcatccgccacagagaccacccagctgacagctgactcccaccccagctatcacaccgacgggttcaactaaattcaggagaggctgtgattagagggatgaatcagcatctggccactgcaaccttagaatcatgaactgtagtcactgaagatgggaaggcagccgtcaacctgacccgctgtggctggtcagggccactcccacctcctcttaagtccacccatctgtcaatccttgatacatgaagtgcgtagcatgcagtatttaaagcagtgtagctacggtc

SEQ ID NO: 50 - DNA, 1434 bp, Homo sapiens
agagtgcaggctgtgagaggagcgcagcagatcacagttctgggatgcagaccctggtgctactcctctggactggagccctgcttgggcacggcagcagccagaatgtccctgacagctctcaggattccccagcccctgacagcaccggggagcccgtagtggaggaggatgaccccttcttcaaggcccccgtgaacaagttggcagcagctgtttccaacttcggctacgatctctaccgcctgagatccggtgctgtctcaaccggcaacattctgctgtctcctctcagcgtggccacggccctctcggccctttccctgggagctgaacagcgaacagagtctgtcattcaccgggctctctactacgacttgatcaacaatcctgacatccacagcacctacaaggagctccttgcctctgttactgcccctgagaagaacttcaagagtgcctccagaattgtgtttgagaggaaacttcgagtaaaatccagctttgttgctcctctggagaagtcatatgggaccaggccccgaatcctcactggcaaccctcgcatagaccttcaggagattaacaactgggtgcaggcccagatgaaagggaaaattgcccggtctacaagggaaatgcccagtgccctcagcatcctcctccttggcgtggcttacttcaaggggcagtgggcaaccaagtttgactcgagaaagacgaccctccaggattttcacttggacgaggacaggactgtgagagtccccatgatgtcagaccctaaggccatcttacgatatggcttggactctgatctcaactgcaagattgcccagctgcctttgacaggaagcatgagtatcatcttcttcctgcccctgacggtgacccagaacttgaccatgatagaggagagcctcacctctgagttcgttcatgacattgaccgagaactgaagactatccaagctgtgctgactgtccccaagctgaagctgagctatgaaggcgacgttaccaactctttgcaggacatgaagctacagtccttgtttgagtcccctgacttcagcaagattaccggcaaacctgtgaagctcacccaagtggaacacagggcagcttttgagtggaatgaggagggggcagggaccagctctaacccagacctccagcctgtccgcctcaccttcccgctcgactatcaccttaaccgaccgttcatctttgttctgagggacacggacacgggggccctcctcttcataggcagaatcctggaccccagcagcacttaatgtcccagtgcgctacagaaaaccccagagggagggaggactgattacacattccaggaaggtggccgatagcttcaatgtagcctctgcaataaaagagcttttccttaaaaaaaaaaaaaaaaaaaaaaaa

SEQ ID NO: 51 - DNA, 523 bp, Homo sapiens
  misc_feature (457)..(457): n is a, c, g, or t
tttttttttttttttttcccttttaacaacagtctttattgataacttcccaacatctgtaaacatcaggtataaaaatattccattcagctgttttctaaggtgactggccagctcctggagataacctgatggaccttggagaaacacagctcctcacagtcaaggctgcctcttcctccagaattcaacacaacaggaaaaaagtactccacagagggaaaggagacatagttgaatcagcagctgccagtgggtaggaacaagctcatccctcctgtgcccacccagggtgtgggggatgacaatctggctttggtctctggagaccttagaagcactgttcaaagctggcccaggctgatttcaaggttacctctacccatccccactgccccagctagacatacatgctggcatacgaagtcctgctcttacggggagtggcaggaattangaaccctgcctacaaaagaaaggagcagcaaagctgactgactgttaccctacgagaaccactgct

SEQ ID NO: 52 - DNA, 1491 bp, Homo sapiens
atggcggatgagagtgagacagcagtgaagctgccggcaccttcgctgccactgatgatggaagggaatggaaacggccatgagcactgcagcgattgcgagaacgaggaggacatcagccacaacaggggtggcttgagtccagccaatgacactggagccaaaaagaagaaaaagaaacaaaagaagaagaaagagaaaggcaacgacatggattccacccaggatcagcctgtgaagatgaactctttgccagcagagaggatccaggaaatacagaaagccattgagctgttctcagtgggtcaggggcccgccaaaaccatggaggaagccagtaaacgaagctaccagttctgggatacacagccagtgcccaaattaggtgaagtggtaaacacccatggccctgtggaacctgacaaagacaacattcgccaggagccctacaccctaccccagggcttcacttgggatgccttggacctgggagaccgtggtgtgctaaaagaactgtacaccctcctgaacgagaactatgtggaagatgacgataacatgttccgattcgattattccccagagtttctcttgtgggctctccggccaccaggctggctcccacagtggcactgcggggtccgagtggtctcaagtcggaaactggttggattcatcagtgccatcccagcaaacatccacatctatgacacagagaagaagatggtggagatcaacttcctgtgtgtccacaagaagctacgctccaagcgggtggctccagtcttgatccgagagataacccggcgggtccacctggagggcattttccaagctgtttacactgccggcgtagtgttgccaaagcctgttggcacctgcaggtactggcatcggtccctgaaccctcggaagctgattgaagtcaagttctcccacctgagcagaaacatgaccatgcagcgcaccatgaagctgtaccggctgccagagactcccaagacagctgggctacgcccgatggaaaagaaggacattccggtagtgcaccagctgctcagcaggtacctgaagcagtttaacctcacccccgtcatgaaccaggaggaggtagagcactggttctacccccaggagaacatcattgacacttttgtggtagagaatgccaatggtgaggtgactgatttcctgagcttttatacacttccttccaccatcatgaaccatccaacccacaagagtctgaaagctgcatactccttctacaacgtccacacccagacccctcttctagacctcatgagcgacgccctcgttctagccaaaatgaaagggttcgacgtattcaatgcactggatctcatggagaacaaaacattcctggagaagctcaagttcggcataggggacggcaacctgcagtattacctgtacaattggaagtgcccgagcatgggggccgagaaggttgggttggtgttacagtaa

SEQ ID NO: 53 - DNA, 499 bp, Homo sapiens
tttttttttttttttttgcaagggagggaagagtttatttggctttcaattccagttacagttcatcattttggggaagtcaaggtagacgtttgaagcaagtaccatcctgtctggtcaagcagagaaataaatgcactgaaggcgcttgctgctcactttctaacaacccagaggcacacttgttggaacggccaatcttctgactagaatagctagaatacctaccccaccacctcagcttagaagaggtcactgaatccaatttccattacaggattggtcttgatttgatcaatgggaaaccacaagacaacaagcaagcaggggtgtttgagcgaagagcctgaagttcaaaccagaagccacatccccattccttgaatggatcatattgggggccgtgcataacggtgcatgtctttaattcaagtactcaggaggcacagaaaggtggatctctgggaattgaagccaagctcatctacaaaacgatttt

SEQ ID NO: 54 - DNA, 499 bp, Homo sapiens; identical to SEQ ID NO: 53

SEQ ID NO: 55 - DNA, 591 bp, Homo sapiens
tttttttttttttttttaagaaaaaaagaagtatggcttattatgcattcttcatcgagggcattgaagttgcatggactgataaaagttgatgcaaaatgagaaagaaacaaaaaaacaaaaacaaaaaaaaaaaaacaaaaaacaaaaaaaccagcaaaatgtttaccaaaaaactcaaacaaatgagcagtgcctgttcaatttcacagtctctgttgagttcagttgtaaatatgtttcaaatgacattttcttgggaaaaaaaaaatctctacaacattgtggaatgtgaggggcaactgtctcccgggcataggcgtctcaaagctgcagtagattgcgccttgatcaggtggttaatttgtgcttttatcacggagaactttgagcatcctgggaagaggtgcccccacctcaatgatatttctctgagaacaacttttgtaggactgtgtttctttagatacatttagtacaactgtaggtgacgagtagtcagtgattgcttgctagctacacaccagggttgatccattttaaaacttttggcattttgtcctcgtgggccataaatacagaaccttgtgt

SEQ ID NO: 56 - DNA, 550 bp, Homo sapiens
tttttttttttttttttcaatgttcagtttcctttaatgacccccatctcccttgaaggataggtgcaggcagctaggtgactggcaagacatgttcacttgaagatcttgccttgattgacggctttgccaacgtgctggaaggccccctcccaggaaaagtactctcgaacgagggtctgggtctcctcgctaccaggatccagtttccgccatgtatatgactcatagtccacctgccaatctggactcagcggaaaggcaagatcttggcctcggaagacccaaaccccagaaatggagctgctgttgttggttccaaacaggataacactagcaaaggcattctttctcagtttgtccaatcgctgaaacatcccagtgatgaggttacagctcatgaaggtctgggtgagctcttcagggaagcggtactcagcataccacagggaccagccatccttatcaaaatgctcccaaaaatatggcagcgccacagagagggtgtcctcattggagtactttcgcttaaactcatccaacacaaagg

SEQ ID NO: 57 - DNA, 1361 bp, Homo sapiens
tccagtactctggtagaggtctgaccaccatcaaccatgacaacctacagcaacaaaggaccaaagcctgagagaggccggttcctccatttccactctgtgaccttctgggttggcaacgccaagcaggctgcctccttctattgcaacaagatgggcttcgaaccgctggcctacaagggcctggagacgggctcccgggaggtggtcagtcatgtcatcaagcaagggaaaattgtgtttgttctctgctctgctctcaatccctggaacaaagagatgggtgaccacctggtgaagcatggtgatggcgtaaaggacatcgcattcgaggtggaagactgtgaacacattgtgcagaaagcccgagaacggggcgctaaaattgtacgggagccatgggtggaggaagacaaattcgggaaggtgaagttcgctgtgctgcagacgtatggagataccacgcacaccctggtggagaagatcaactacaccggtcgtttcttacctggattcgaggccccaacatacaaggacaccctacttccaaaactacccagctgtaacctggagatcatcgaccatattgtaggcaaccagcccgaccaggaaatggagtctgcctcagaatggtacctgaaaaacctgcagttccaccggttctggtctgtagacgacacacaggtgcacacggagtatagctctctgcgctccatcgtggtggccaactatgaggagtccatcaaaatgcccattaatgaaccggccccgggcaggaagaagtctcagatccaggaatatgtggactataatgggggtgctggggtccagcacatcgctctcaggaccgaagacatcatcacaacgatccgccacttgagggaacgaggcatggagttcttggctgtcccgtcttcttactacagactgcttcgggagaatctcaagacctccaagatccaagtgaaggagaacatggatgtcttggaggagctaaaaatcctggtagactacgatgagaaaggctacctcctacagatcttcaccaagcccatgcaggaccggcccacgctcttcttggaagtcatccaacgccacaaccaccagggctttggagcaggtaacttcaactctctgttcaaagctttcgaagaggagcaagccctacggggtaacctcactgacctggagaccaacggtgtgaggtctggaatgtaagctccacccacacccagaccgcgcaaggcgctggacaagtcaatcagctccaactggctgaaaggctggacctcagggctccacccacaccatggccacgccccctctacggcaaggcttctcctgatccgtttcgagtaaac

SEQ ID NO: 58 - DNA, 1361 bp, Homo sapiens; identical to SEQ ID NO: 57

SEQ ID NO: 59 - DNA, 516 bp, Homo sapiens
tttttttttttttttttataaagcaattccaaagtttattgccatagaaaaaactgatttctcaaagtcaattcttattctctgtaaaataatacacatgaacagaaatcactatacttttggtccaagatatgttgggtttttccttcttcttcagatgatggatagatgcagccaaaatctatgaacgcgtgtacttgccccaaatgtgcagcataaacacagaagcgatgaacagaagactcatcaccagtactgggacagggccaactttgagccctggggaatcttctgtgtagaatcgccacatccccccagtccctgcagaggtggtgcggcctgcactccgggttccgcagctggcattttttctctgccggacagtggatcccgccgcccgtgcggccactgctttgctaggagaacgcccagaggagcccacgttggtggcactaggcgttggacccggcatgctgatgtctaagaacagtaggcacaagagatatgaagatgaaa

SEQ ID NO: 60 - DNA, 580 bp, Homo sapiens
tttttttttttttttttctgatcttaattcattttattctacaaaatgctactcagtggaaagtaggaaagccaacaagacaacaagaacataaaacgagaacaaaccccgagggaaaataagttttaatatgttcttccctccatagcagcaagctctaaacagctttccttagtgcaaatactgtaggcttgtgtcacacacagtacacagaacaacgcaacacacaccaccacagatgcttctgagcagagatactcctcaaaaatttaaaactatacaaagattttttgagcacgtggtcctgcctggagaattcgactagagagaccctcctaggaccatttcaccattactgtaaaaacgggacaaaaggtccccagaaaggaaattagaattccccatggagccataaaaccttgtacaactcgtttgcctccagggtctaatagcaaatttcactgcacgtcattgacatatcccaaatacggatgcataaagcttgagtttctacgatataccaaaatacgatatatatacaactcccactgcaaaagaaaccctgatacctagtctttat

SEQ ID NO: 61 - DNA, 551 bp, Homo sapiens
tttttttttttttttttccacttcttaaatttttatttatttttttaaaatttacttgtttctgcataactttgagtgatgttacatgcttatacaggatgctggggccagtagtagccaaataaaggcatcaagacatgggtggaaactggaatttccagaggttgtaagcagccatgtgggtggtgggaaatgtccctgtgtcctttgcaagatcagcaacttttcctagtatctgtccttctctccagcattcttacacattgattcagttctaccaggctgtaagttattggctataagttatgagtatcagcggcatagcaaaggctatatggcatcattagacataacctgcaaaagggcacaaatgcattcaggatagggagagctgaatgcaggcatcataagatcaggctggcaggaagaaagtatcctcatcttggaacatggtttccccctacttgcccatcctgacagagctttggattggtggagatactgaagagaggactctccccatgtagtaaatgtgtctttatggagatgag

SEQ ID NO: 62 - DNA, 547 bp, Homo sapiens
tttttttttttttttttccaagaaacaaacattttaatgcagaaaaccatgataatctacaaatgaatcacagtggaggcctataccggaccccctcaggaactgtaaggactgggacgtggacactgaactgacaacaccgtcagcatctggacatgcccaggcagctgtgctggcctcacggcacctaggccttgcccccttgccttccaccattcattccccaatgggaagaccagaagttaagttcagaatagaagggggagaggtggaggatgctgctggctctggtacctgccccatgactcaaggccaggcctactcccaggtctctgtccctctcctctgcagggacctagcaggaacacgaggaggggacctagggaaggggtggctggatggcatctggcttggagaagttggcagcctcagataaggcagctgctggaggaactgtcaggtgcagctgggacctctccccccaagatgacagctgaattggcttcctgctggcttggagctcagcacctctcactggggcatacat

SEQ ID NO: 63 - DNA, 528 bp, Homo sapiens
tttttttttttttttttactggtactaaaggttttactgtaataaaccaaatatatttacaatttatacaaatgttgaaacaacaaaaatacaaaaagaaaaaaaaatcacaagatgcaaaaccaagaaacaagttcactggagacaccactgctctacaaagactcaaggtgaattgaactgcgagaaacagaacggtaagctcgcagtcagcaaaggcaggacggcagacagcagcttgctcctctattccacacctgtggcctcggtgtgattgtggtgtccaaagttagacaggtgagtgtctactgatagacttggtgccttctttttgtagacgcaaagcagttctgtgtcaagatttggaaacaggtttcttcagtttttttgatgttgtttttgttttttttaaattataagttctatttctacaaattccaaacatttggcccaattcaactgtaaatatgaagccatggtattctcagtagatgacctcataaacggtagcctttttgtcccctgagc

SEQ ID NO: 64 - DNA, 335 bp, Homo sapiens
tttttttttttttttttggggaaaaaatgtaaaactttatttttttttcaaagcagtaacgcatctcagctgtgttcagctacagtacaaagaacaatggaatagcaccagggaatttctaaaaagttcacaagatccgtgacaccttcctcttctgatcattcttctcggctaaccaagcaaagaaagcagagcccccactttccattccttcagctactgtcccaccagcggtctgattttcatccgaacggccctcagagaataatccgctcctctgaagggaacccagaccactccgttctctatctcatagggactgttgttcctggggt

SEQ ID NO: 65 - DNA, 511 bp, Homo sapiens
tttttttttttttttttcgttagaaagcactatttatttcttcttactcttgtttcgtttctcttctttcagcttctttttggagactctgggtgtgctggcctttttgtataggtgatacccaatcaggcccaggagtgctggcaccatggccatgcctaccagaggcaaaatgcccttcagcagcttttgccagtagttggctcgaatcaaggcgatcagctccacatcatactgcaccactgcatcggctgggatagatggtgggtaccctctctttccataagccaagtgagaaggaatgactgctcttcgcttctcccctacacacatgtccagaaggctctgctccagacctgggatcacctgcttttggccaagttctatgaccagaggatctctggtcagagaagtgtcaataatgcgtccatctgccaagctgcccgtgtagtgtatgtggagcgtgtctccaaaggcagcggattccgtgcacgattcagggggctgcacc

SEQ ID NO: 66 - DNA, 469 bp, Homo sapiens
  misc_feature (435)..(435): n is a, c, g, or t
tttttttttttttttttaacaaaaacaagctcacatttatttttaccccaatgagaatgtacaagtgaaacaggatgagtaaatgtagtcaccagcagcccctgagccccttctcaacctctcccatgcttggccactgctagttggaaacgctttggagcagagtaatattatctcctttgagcatgatccgacccagttgttttcttgactttgttttagaatgaatttcttctgcatcatctaatacgaggttcatgtactcatcaaagccaataatacaaccctctatccgcatattcacttgttcatacagccacacctgaattcgagatctattttgcaagtatctgaagataaggttgatgggctgcaccatcaccttctgcaccttctggccctggccgcggtacgccatggtggaagtcacaaaanaaaaaaaaaaaaacctttcctcgtgccgaattct

SEQ ID NO: 67 - DNA, 569 bp, Homo sapiens
tttttttttttttttttatatataaaatcacatttatttgagactgggactttcgaagcccagtctggcctgatctagtgtccagaagcactgattagcagatgtgttttcctctagctggctacaatggctgcggttcattctattcagatgtcagacaataggcacagctgggttccttattcaaaatctgaaggagtctgggaggaggacaaacacatagatagaatcaagcttaggccaggaaccagaaactacggattgctttgttaaaggccaaggaggcttcaaaagcgaacacagctggagtctcatttcagtctccattttcgcaccacttcagtggaagttccatgaaacagcccgatggttctgaagtgccatcaagtcacttcgagctccagcaacttaggtttccaggacatcttctagaagaactcgatcatcccttccacgttatggggccactcacctggcctcgatgcccacctggactcgaagtagccctgcaccgcgcctgtaccctgatgacgacggatgcagaaaaggtgagggccgccctcgtgccg

SEQ ID NO: 68 - DNA, 569 bp, Homo sapiens; identical to SEQ ID NO: 67

SEQ ID NO: 69 - DNA, 559 bp, Homo sapiens
tttttttttttttttttcacacagggttgcttttatttccacatccaacttgagcagaggccctgccacaacctgaacagctgtgaggtgctgggtgcctccagagtttctggcacagtaagtgttgggtgtgcagacttcctgatggccacatgacactggcccacacaggaacagcaagtccatgaatggaaatcccactgagctggaagtggaggctctggaaaccccatgggcagcagcaggagttaaaggagccaccaggaacactgcagtgaggctccaatgcagacagggctgataaaaacccaaacagggcattgtgagagcagaggctcgagtgtccccgctgaggacccggggctgaaggcacagagctgtgtcgggatggaagaaccctgggtgcactcgcagtccagagcacgaaagcacaggtgagaacccagcccgaggctctctgtgaagagtgtggccttggatcttgggcacggcacagtgacacacagtgctgaggtcaatcctgacttcccagaggaatgacctcttcagtgacaaaaaa

SEQ ID NO: 70 - DNA, 559 bp, Homo sapiens; identical to SEQ ID NO: 69

SEQ ID NO: 71 - DNA, 1840 bp, Homo sapiens
gggggctggcgccggaatcctctgagtgtagggagctgcactgctggctgccgaggcctctggtttgttcctggcttaccaagttagctgagtaggcggcggagcggcggcccccggagggtcactatgtgggccttcccggagttacctctgccgctgccgctgttggtgaatttgatcggatcgctgttgggatttgtggctaccgtcaccctcatccctgccttccgtagccactttatcgccgcgcgtctctgtggccaggacctcaacaagctcagccggcagcagatcccagagtcccagggagtgatcagcggtgctgttttccttatcatcctcttctgcttcatccctttccctttcctgaactgctttgtggaggagcagtgtaaggcattcccccaccatgaatttgtggccctgataggtgccctccttgctatctgctgcatgatcttcctgggttttgctgatgacgtactcaatctgcgatggcgtcataagctgctgctccccacagctgcctcactacctctcctcatggtctacttcactaactttggcaatacaaccattgtggtgccgaagcccttccgctggattcttggcctgcatttggatttgggcatcctgtactatgtctacatgggactgcttgcagtgttctgtaccaatgccatcaacatcctagcgggaattaatggcctagaggctggtcaatcactagtcatctctgcttctattattgtcttcaacctggtggagctggaaggtgattatcgggacgatcatgtcttttccctctacttcatgatgccatttttttttaccaccttgggattgctgtaccataactggtacccgtctcaggtgtttgtgggagacaccttctgttattttgctggcatgacctttgccgtggtgggaatcttgggacacttcagcaagaccatgctgctcttctttatgccacaagtattcaatttcctctactcactgcctcagctctttcagatcatcccctgccctcgacaccgtatgcccagactcaatacgaagacaggcaaactggagatgagctattccaagttcaagaccaagagcctctctttcttgggcacgtttattttaaaggtagcagagagcctccggctggtgacagttcaccgaggggagagtgaggatggtgccttcactgagtgtaacaacatgaccctcatcaacttgctacttaaagtctttgggcctacacatgagagaaacctcacactgttcctgctgctcctgcaggttctgagcagcgctgtcaccttctccattcgttaccagctcgtccgactcttctatgatgtctgagctccctgacgactgccctttaccacacagtctccattggacctcagccaggacccacctctgtccgctccgaccgccttctggtccaggctcagcttctgccgtcatctgtgactactgacatcctggatggactccttagtggacttgacgtccactagttggacttgcctatgctttcttgagtttgctactccctccctttctgcagcctcaccaggtgggcctgtagcatcttttatgcaaatattcatggctcaactttcagaaccctaactctaaaggaatcccctgggccttgagagagaacctgggctagggctagagttagggcaacatactccaaggtaacctcacatctgactatcaaattaagtgttctgattaggaagagcagaggcagggccatgtgctcagaatggtgacaataaaggattgccttttacttgccaaaaaaaaaaaaaaaaaaaaaaaaaaaaaa

SEQ ID NO: 72 - DNA, 547 bp, Homo sapiens
ttttttttttttttaacaccaagaaaacactttaatcaaactacagaaacaatggttatagtacagaatattcataagcaaaagatacaccatgttttaagtacttacaaagttacaaaccatttgcttccttaacattttctgttttttttttaagttcacaacacaagtatcagatttaccattttgcgctttttttttttgagggaaggggggtgtatttatcatcagctagatgtgctcactgtatgctccattatttatatgcaaggcccgggtgactggaagtgcagttgtcaggcattttaataaactggacagccatttgtttctgcacgacaaggcatctttacacaggagcaatcaggagaaaacaggaaacagccaagcactctgcactgcaacacgccaccttaacagctaaccagcattactcaactgctacacaactgcgcctagtgcacaaaaatacataagagaagagattagaattgtgtcgggtaaacaatcctttaaaaaaaaaataagtcttttcacctgaaaagtc

SEQ ID NO: 73 - DNA, 1822 bp, Homo sapiens
aggccagctttggatcctgcagggagcggggagctgagagaagagacgctgagaaagcgggcgcaccacggagggagagaaaagctccagaagccgggcagcgcttttacgcacagctaccaactggccgctgccgaccgtctccagctcccgaggacgcgcgaccggacgccgggtcccgccacagccgaggacagctcgccggtcgccgcagcgaggcccggagcggcccttcagggggacctttcccagatcgcccaggccgcccggatgtgcacgaaaatggaacagcctttctatcacgacgactcatacgcagcggcaggatacggtcggagccctggcagtctttctcttcacgactacaaactcctgaaacccaccttagcgctcaacctggcagatccttatcggggtctcaagggtcctggggcgcggggtccaggcccagagggcagtggggcaggcagctacttttcgggtcagggatcagacacaggcgcatctctgaagctagcctccacggaactggagcgcttgatcgtccccaacagcaacggcgtgatcacgacgacgcccacgcctccgggacagtacttttacccccgtgggggcggcagcggcggaggtacagggggcggcgtcaccgaggagcaggagggctttgcggacggttttgtcaaagccctggacgacctgcacaagatgaaccacgtgacgccccccaacgtgtctctgggcgccagcgggggtccccaggccgggcctgggggcgtctatgctggtccggagccgcctccggtctacaccaacctcagcagttactccccagcctctgcaccctctggaggttccgggaccgccgtcgggactgggagctcatacccgacggccaccatcagctacctcccacatgcaccaccctttgcgggcggccacccggcgcagctgggcttgagtcgcggcgcttccgcctttaaagaggaaccgcagaccgtaccggaggcacgcagccgcgacgccacgccgcctgtgtcccccatcaacatggaagaccaggagcgcatcaaagtggagcgaaagcggctgcggaacaggctggcggccaccaaatgccggaagcggaagctggagcgcatcgcgcgcctggaggacaaggtgaagacactcaaggctgagaacgcggggctgtcaagtactgccggcctcctacgggagcaagtggcgcagctcaagcagaaggtcatgacccacgtcagcaacggctgccagttgctgctaggggtcaagggacacgccttctgagagcctcccttgctccatacggacacccccagccttgaaggctgggcgcccgccccccactggggtgaggggggcaggcgatgggcactcgcccagaggtctggggcgcagctcacacactggactctggcctgcccgcctgcgcccagtccttccacctcgaggtttacatggcccccttccagcgtattttgtatgttttttttttctggaaagagactgaattcatattgaatataatatatttgtgtatttaacagggaggggagaagggggttgtcgcggcggagctggccccgccgcctggtactcagcctgtggggatactagggaggaacctccgccccctgccctccccctctgcacagtactgtggagaagaaacacgcacttcgtgtctaaagtctattttaagatgtgtttgtgtgtgtgtttgactttttattgaatctatttaagtaaaaaaaaagtctttattaaaaaaaaaaaaaaaaaaaaaaaaaaaaaaaaaaaaaaa

SEQ ID NO: 74 - DNA, 2954 bp, Homo sapiens
ccggctccggagcaccgcgacttcgttcggtccgactccccggcggggtggcggcggccgggtccccacggtggcggccggagcagcggctgcaggagcccggctctaggatgaagttcaagcccaaccagacgcggacatacgaccgcgagggcttcaagaagcgggcggcctgcctgtgcttccgcagcgagcaggaggacgaggtgctgttggtgagcagcagtcggtacccagaccaatggatcgtgccgggaggaggggtggagccggaggaggagcctggcggtgctgctgcaagggaagtgtatgaagaggctggagtcaaaggaaaattaggcagactcctgggaatatttgagaatcaagaccggaagcacagaacatatgtttatgttctgacagtcactgaaatattggaagactgggaagactctgttaacatagggaggaagagagagtggttcaaagtggaagacgcaatcaaggttcttcagtgtcacaagcctgtccacgcagagtacctggaaaggctgaagctggggtgttctccgaccaacgggaattccacggtcccttccctcccagataacaatgccttgtttgtgactgccgcaccaccctctggggtgccatccagtataagatagagagctggggcccctcccccaccgtgtcatggcacatgtcagagggagagaggcttttttacttctaacacatctgactgctgctggcagactctagatttgccatgcaggggtttcaaataatttgcatgtatttcagatgctttcaactcttttaaaataaataacaaaatagcaaaaatactttaagatgccaaagccatgtggattttttttaaagccttaattgtaagtctaccccattactttggttctcatttttataacctttcttaaaatttcacttttgaacactcaacattctatggtttattttgacagatcaactggttgttgggtatgtttttgccctaatatttttttcttacagtatcaaatagtcaccaaatctttgggaattaatgaaaaatattcttggtatttaaaaaaatatatatgtgccccaaaacttgtttaagagagtcgcattctctccacttgtaagctgcaggtttgcgctgatttgtatggacgggccagttgcctttgaccaagcactcaagtttactctatccgagaatttgtacacagcaagaattatgtcagtgcacaggcactgcctcccctctgacacggtgattccatatgaatcactccatttttagggaaaactgtcaggaacttgcctgtggcaccgcacagctcattctgaaactgttcagagaagtctgttcagcacgctctgcggctgcttcctccctgctccttccgacacagactgtgttaggggccacattgctcccatggccagtgctcttcatattttcagtctagcaacaacactgttgaccagtggattagactctaaccttagatacagcagtcactgactggcatccaaggttagatcacactaaacaaaatggctgtcctaggcctaagacactgtcttgagtgtcagtaagcagcttgtcagatgagtgtgagggaactagaactatgttaccttgtctttgtgctctctcaaaacgggccaccccatggaaaagtacctacatttccttcaggaagtcatggaggaagtgaagggggaggggggagaggaaaagatctttcgcagtacagttaggacatctgtaacctgttaacctttaaattgtaatgttgctgctgccaatgtccttacctgtaaggaaggaaaatgagatctcgtgcccaaatgcagcagaactaaaaacattaggttacaaagcagaaaaacccaaccagtagtgttcattctaaattatgtagcgtaaacaaatgtgatcgtccagaccttttctatttttctttgtacagaggtcatgtactctgggtgtgttttaaaagaaacattttaaagaaacccacagattgacattttctatcttttcgttttctcacgattctctgcaatttttccatgtactaaacacaacagaaactggactgttttgtatagaatactgcttccagctaaaaccatcacaagtgcccgggagtttatgtggacatgatagatactctgggcggtaataatgcatgaacctgttttataaactcttgaactgtgtattgccatgtaaaatatgtacagtattaatgtcaaccatctctttaaaagttagcctatgaacattgttgtataatttctttggtcagaaacatttggactaagtcatgtcacctgggtcaggattttcttcaatgccgtgtagcaaaactgtctttagtctatgcaaatagcgagtcactgagtgtgacagaatgcaacttcactgttaaacttcacctgagggttcctcattctggaatccagactgcaagattataaaggaaaagacctaaggcaattcagttctttttgcaaatcaattgaatccacgagagatgtctaccagcgagatgtttaccagcccagccgcctgcagcctgcagcctgctgtgtgtgcttatttgtgcgctgaataaaatggggcagctaaattctccagttccatatgcctccgaagttcaaagaaaagaaagcaaagtaacatgttagacttgacttgtgtggcggggtaaagaaatggcatcttcccactaagaacgaaccatccagttcttttgtcagtcacactatgaaacagggaaggtgaagggaagaaatggttatgtgtgcacgaatcgctttgcatggtctcatgagatggctgcattcgaactgttttaagaattgtaaggatcttgacttttttacatttggaaacatcaaataaaaacaaacataatctgtgaaaaaaaaaaaaaaaaaaaaaaaaa

SEQ ID NO: 75 - DNA, 2590 bp, Homo sapiens
ggcgcggcgcctccgctctggcccgagatgaatgctgcggcagaagccgagttcaacatcctgctggccaccgactcgtacaaggttactcactataaacaatacccacccaacacaagcaaagtttattcctactttgaatgccgtgaaaagaagacagaaaactccaaagtaaggaaggtgaaatacgaggaaacagtattttatgggttgcagtacattcttaataagtacttaaaaggtaaagtagtgaccaaagagaaaatccaggaggccaaagaagtgtacagagaacatttccaagatgatgtcttcaatgaaaggggatggaactacatccttgagaaatatgacggtcatctcccaattgaagtaaaggctgttcctgagggctctgtcatccccagagggaacgtgctgttcacagtggaaaacacagacccagagtgctactggctcaccaactggattgagactattcttgtccagtcctggtatccaattacagtggccacaaattcaagagagcagaagaaaatcctggccaaatatttgttagaaacttctggtaacttagacggtctggaatataagttacatgacttcggctacagaggagtctcttcacaagagactgccggcataggggcatctgctcatttggttaacttcaaaggaacagatactgtggcgggaattgctctaattaaaaaatactatgggacaaaagatcctgttccaggctattctgttccagcggcagagcacagtaccataacagcgtgggggaaagaccatgaaaaagatgcttttgaacacatagtaacacagttctcatcagtgcctgtgtctgtggtcagcgatagctatgacatctataacgcgtgtgagaaaatatggggtgaagacctgagacacctgatagtgtcgagaagtacagaggcaccactgatcatcagacctgattctggaaatccgctcgacactgtcctgaaggtcttagatatattaggcaagaagttccctgtctctgagaactccaaaggctacaagttgctgccaccttaccttagagtcattcaaggggacggagtggatatcaatactctacaggagattgtcgagggaatgaaacagaaaaagtggagtattgagaatgtctcctttggttctggtggcgctttgctacagaagttaaccagagacctcttgaattgctccttcaagtgcagctatgttgtaaccaatggccttggggttaatgtctttaaggacccagttgctgatcccaacaaaaggtcgaaaaagggccggctgtctttacataggacaccagcagggacctttgtcacccttgaagaaggaaaaggagaccttgaagaatatggccatgatcttctccatacggttttcaagaatgggaaggtgacaaaaagctactcgtttgacgaagtcagaaaaaatgcacagctgaacatggagcaggatgtggcgcctcactaggctttgtgtgagtgggtggttgtgtgtgcagtgtgtgtgcatacgtgcgcgcatgtgtgcgcctgtgcgtgtgtactaacagtcattgtacagatgtgtgggtttgtttatgatacactgcagccaggttatttgttggtttatggacatactgccctttttatttttcccagtgtttagatgatctcaaattagaaaacacttataaccatgtgcaagattaatgctaagtaagcttcttagggcctttgctaatagatagtaactcaatccggtgttgatcttttcacaagtaacagaaccaagaaacttttctatataactacaatcacataaaacagatttgcataaattaccatgcctgctttatgtttatatttaacttgtatttttgtacaaacgagattgtgtaagatatatttaaagtttccgtgatttaacagtctgtttccaacttttcatgatttttatgagcacagactttcaagaaaatacttgaaataaattacattgccttttgtccattaatcagcaaataaaacatggccttaacagagttgtttgtgttgttgtacatttggaaattatgtcaggacatatacccaacagaattactaacatcactgcccttgtagaatatgcagtaatcattgtccactgaagagaatcatggttcttccgcgatgtttaggcattgtacagttctgtagcctggtcattgtattgtaccagtgatgccaaatcccgaaggcctgttctgcgattttatatgtcggatattgcctgtggctctaatatgcacctcaagattttaagaagataatgtttttagagagaatttctgcttccactatagaatatatacataaatgtaaaatattaaaagtggaagcagtgtattttaaagtaattacacttctgaatttatttttcatattctatagttggtatgacttaaatgaactgctggagtgggtagtgagtgtacttattttaaatgttttgattctgttatattttcattaagttttttaaaaattaaattggatattaaactgtaaaaaaaaaaaaaaaaaaaaaaaaaaaa

SEQ ID NO: 76 - DNA, 627 bp, Homo sapiens
ggcatttcaaatgctactgctgtgagtaggatttattttaagaaatgaacgacagctgatacaaaatgtttgcctccaagaagtatgtcatacttacaagggaaaaggtaattaatattgaacattttccttgttcaacggttctaatttttataagggttttataagtctcatagtcactaagcaggttctttttgaaaggtaggcttcatgacccatttgacttcgtgcctttacatgacatgacaaattattttattcaaattatgttttccaaaagagagggttctgtgctagtcgtctttgaaagttttcataccatttcagaaccacatttgctgggatgaacatttccgatggatttggtgtcatctgggcctgagagagagcaaatgatgaagcaaaattgtagaagttgtccaacatcttctgtgtgaactgtgtgaaggagtcaaccgaggacacagcggcactgcctacgggagtctgctgagccaaactgtccaacaactccaccgagattccaatctgggcaacagatggggttcgcacaatattcatggctccaaatgggtgctggcttccttctccagatttaagacctgatattttgaagatggcacttgg

SEQ ID NO: 77 - DNA, 607 bp, Homo sapiens
ggaacgggtactattatttattataaccagggcactccaccttccctcaggggatagatgaagtatacttgtcatgtaagtcagctacattgtcactggagacacggatccagccatcctcccgcacatggtagaggttgactgctcctccggagtaggcatctctgtaggtggcttggtagatggctcggcgggccaggtcataggcctcctccacttgtaggtcataggagtagcctcgatccatgactccaaacgcatacacggagccagatcccactgagaaggcggttccagagatcctgttcccctcactgtctacatagtagaggcccgggcctctcttatcccagccacagatcatggtgcccatggacagccccatgcctttgtactgatacaccatgttggcaagcagtttggaagccgccgcgaccgagatgcgttccttgttgcgaagctcatagattcgacactgtcgagccaacaaccgctcccagaagctgcaatccgctgcacccccagccatggtgcccagaacgtaagggttgatctctatcactttcttcactgtctgggaagcaatgtaggcacctgccgtggcccg

SEQ ID NO: 78 - DNA, 447 bp, Homo sapiens
gaaaccggcaggactggaagggacgtctcctctccgaagactcttcaagaaatcacaatgtcaaccaacacagaccttcctctctcttcatacgatgaaggtcaggggtccaagtttattcggaaagctagggagacaccgtttgtccccattggaatggccggcttcgcagcgattgttgcatatgggctctacaagctgaagagcaggggaaacacgaagatgtctattcacttgatccacatgcgtgtggcagcccagggctttgttgtgggggccatgactcttggtatgggctattccatgtatcaagaattctgggccaagcgtaagccttagaagagctggtggcatgggaagtgcttgctttagttagacgtctcatattgaggttacgtgtttgtatctacaataaataacatgtggtgttagacaaaaaaaaaaaaa

SEQ ID NO: 79 - DNA, 484 bp, Homo sapiens
  misc_feature (364)..(364): n is a, c, g, or t
actgtggctaaacagccacaattagcaactttaatataaagtttttaatacaaagttcaccacaaagaaagcagatgccatgcgtggaggcacgtggactgcagctgcctcatcctcaagtcccgggcttctggtgttttgtcctcggatccagcagttcccatgtggaggctgcatggcctctgtccttaacattgatgccgtgggtcatgaggtcctggcggagtgcgtcacatgcctccagcaagggctgcctctcctggagctgctgtttccgggcctccccggtggccccaggcgtggccagtgcatactggcggaccttaagcctgaagcgcactagttcatctaccacacagtgcanggctactgtgctgctgtctcctgaaacacactgtcgcttggccagagaaatccaacagtctcgaaaaactgctcaacgtaggcaacgatggccccaaacacagtgggacttctcgggcca

SEQ ID NO: 80 - DNA, 3150 bp, Homo sapiens
ctgcggaagcagcgtcgccggaaccatgggcaccggatcgcttgcccctggtgtccgtgctggtggcgggaacactgggtggctctggatgagctcctgcaacttaggtttgccagtcctgtctatttcttttcttatttggttgttactggctgcgcctggcgctcaggccgcgggttacaagacatgtcccaccacgaagccaggcatgctcaacgtgcacctgctgcctcacacacacgatgatgtgggctggctgaagacagtagaccaatactactacggcatcatgagtgacgtccagcatgcatctgttcagtacatcctagactcagtgatttactctctactgaacgatcccacccgtcgcttcatatacgtggaaatggctttcttctcccgttggtggaagcagcagaccaatgtaacacaggacgctgtacggaacctggtgcgccaggggcgcctggagtttgtcaatggtggctgggtaatgaatgatgaggcagccactcactatggtgctattgtggaccagatgacacttgggctacgcttcctgcaggacacatttggtagtgatggacttccccgtgtggcctggcacattgacccttttggccattctcgagaacaggcctccctgtttgcccagatgggttttgatggcttcttcctcgggcgcattgactaccaagataaatttaaccggaagagaaagctgaagatggaggaactctggagggctagcgccagcttgaagccccctgctgctgacctctttactggtgtgctccccaataattacaaccctccaaaagacctgtgctgggatgtgctgtgtacagaccctcccgtggtggacgatcccacaagccctgagtttaatgccaataagttggttgattacttcctgaacctcgcctcttcccagaaaaagtattaccgaaccaaccacaccgtgatgaccatgggctcagacttccagtatgagaatgccaacatgtggttcaaaaacatggacaagcttatccgcctggtcaacgagcagcaggcaaacgggagcaaggtccacgtgctctactccaccccttcgtgttacctctgggagctgaacaaggccaatctcacttggacagtgaaggaggacgacttctttccttatgctgatggcccccacatgttctggactggctatttctccagtaggccagccctcaagcgctatgagcgcctcagctacaacttcctgcaggtgtgcaaccagctggaagcactggtgggtcccgaggccaaagtgggaccctacggctcaggagacagtgcacccctcaatgaggcaatggcggtgctgcagcaccacgatgctgtcactggtactgcaaggcagaatgttgtcaatgactatgcgaagcagctggcggcaggctggggaccctgtgaggttctcgtgagcaacgctctggcgcgactcagcctttacaaacagaacttctcattctgtcgggagatcaacatcagtatctgcccagccagccagacgtcagagcacttccgggtaattatttacaaccccgtggggcggaaggtggatctgatggttcggctgccggtcagtgaaggcatcttccttgtgaaggaccctaacgataggagaatttccagtaatgtggtgatggttcccagtgcttacagtaagacgtatcaatgggagctgctgttcccagcctcagtgcctgccctgggcttcagcatctactctgtgaacaaaatgagtggccataaccatcaggcccacaacctaacggccaggcccaagaaatccaagtcccgtgtcttagtcattgaaaataagtacatacgggccacatttgactctgacacagggttattgaggaagattgaaaacctggaacagaacatttcgctccctgtgagacaaggcttcttttggtacaatgccagcgctggtgatgaggagagtcctcaggcctctggtgcctacatcttcagacccagtcatcgtaaaccactgcctgtgagccactgggctcaggtcactttggtgaagacaaacttggtgcaggaggtacaccagaatttttcagcctggtgttcccaagtgattcgcctgtatgaaggacagcgtcatttggagctggagtggacggtgggaccaatcccagtgaaagatgactggggaaaggaagtcatcagccgctttaacaccccgatgagaaccagggggcagttcttcacggacagcaacggccgggaaatcctgaagaggagggacgatttccgacccacctggacattaaatcagactgaaccagtggctggaaattactaccctgtcaacactcgcatttacatcacggacgggcatatgcagctgaccgtgctgaccgaccgttcccaggggggcagcagtctgctggatggctcattggagctcatggttcaccgacggctgttggtagatgatgaacgtggggtggcggaacccttgctggagacagatacgggggataaggttcgagggcgccaccttgtgattttgagttctgtcagtgatgcggctgcaagacaccgactgctggcggagcaggaagtcctggcccctcaggtggtgctggcccacgggggtagcagtccctatcactcgcaggcaccaaaaatgcagttctccgcacttcgccgggagctacctccgcaggtgcatctgctcaccctggctcgctggggtccaaagatgctgctgctgcgcttggagcaccagttcgctgtgaaggaagattcaaatcgcaacctgagctctccggtgaccttgaacttgcagaacctgttcaagaccttcactatcaactacctgcaggagaccacactggcagccaaccagcccctatccagggtttccaggctcaagtggatgacagatactggtcccatctcctaccctgctccttcccggttggaccctacctcaatcacactgcagcctatgcaaatccgtaccttcctggcctcggttcaatggcagagactcatctaggcctgccaggaggaggggcaggcctccccttctcttgctggaaccactcacaaaaatcattaaaagacttctattgagactcaaaaaaaaaaaaa

SEQ ID NO: 81 - DNA, 421 bp, Homo sapiens
caggaaaaaagcattttattcacatataaccgaagcccctgggtctgctgggggggggggggggctgcagggagtctcagttggcttccgatggtctctcctgagatgtgagcttccagctgtgccctctcaccctctgcgatgaatactcagtagattccataggtgggctcatgactgtccctgtatcggtccagatagcgtaggggctgctggtgggggaagcgcttctgcttggggtggtaagggggtggccgtacaaattcaaacacaggttcccgcatgtctagaagctggtggaaggtgtgggtgaccgagtcatcccagcggcactggaagaaagccagaccagctggagtcatggcttcctggtgtttcttgtacaaatcaacggtgtggaaggtcctctgggccagctggt

SEQ ID NO: 82 - DNA, 516 bp, Homo sapiens
aatacaagtaaaagggggcagggcaactccttccccctccaggtcaggaccaggagaatctgctgggctgtccccgggaccaaagaggaaaagagtgacatagaaactgaagcaaaggaagcttagtcacactcaggtgagggtgacagctcctcctggattttgtttccatttattaaaaaaaaaaagaaaagaaagaaagaaaaagccaccccctcactcccagcccattcctcacagccagggtcagaaagcagcatcagtgaggcgggttcctcacctctggttatctctggcccaggtcagcttgagccacctgccctcaccaggagagggtttcagttggcagttaggcttggggaagtctctacctggaccccccagaggcctgggagcacccccctcctcccaggaaagggaatgcagtgtctactgggctcagaggggtggcctcacccacctgacatgagtcctgattctcccatctcgaggacggcaggaagtttattgcaccag

SEQ ID NO: 83 - DNA, 558 bp, Homo sapiens
aaatggttcagaatcactgtgaggcttttagatgttcccattattcaaacaacccaaattaaaaacatacaactcacattttaagtaatataagcaaaataaaaattatctttaacaatgccttatattttgttttagtattctactatagacacataagaataattatttccattttctgcttccctcaaaactataaaatgctgttacatatttttgaaaaatcaaactccttcatatcctttcatcaattttatgttgaaaagagagttattttgaagcactggaattagtgttggaaaaataggtttagagtccaaagctggtgtgtttgcgaataagaacacaagctgacaagtgatttaaattccttagaaaccttcacagttctccatatgtacatgtggcagaaggatgaattgccagccaatatacatcagtgatcagttgcttacatttcaaagatcaaaacacttggtgggaagcctagaaggaaacacttaaagacatataattaagaactcttatctctgaaaagcaaagtccacattttagtta

SEQ ID NO: 84 - DNA, 807 bp, Homo sapiens
gattggaaggcaccactctgtacttgaggcgggccggaacagaacctcctccattcacagcatctgccagctacaggctctaccctgttcccaccatcttcctccatctacccactgagttactggttgggactttggagctaagcatcatggggactccaaatgatcaggcagtgctgcaggccatcctcaaccctaataccccctttggagatgttgttggattggacctggaagaaacagaggagggagatgaagatggagttttccctcaagcacagttggagcaatccaaggccctggagttgcagggagtgagggcagcagaagctggggacctccacacagccctggagaggtttggcaaagccattagcctgctacctgagagagcctctgcgtacaacaaccgtgcccaagcgaggcggctccagggggatgtagcaggcgccctagaggacttggagcgcgcggtgacgttgagcggcggccggggtcgcgccgcccgccagagcttcgtgcagcgcgggctgctggcacgatttcagggtcgggacgacgatgcccgcagagacttcgagcaggcggcgagactgggcagctcgttcgcacggcgccagttggtgctgctcaatccgtacgccgcgctgtgcaatcgcatgctggccgacatgatggggcagctgagcgcgcccagtaacgggcgctgagcgcggctcgctagatgatgaaggggggaccctgacccaaccagaacccaataaaacttccgggacgctcaaaaaaaaaaaaaaaaaaaaaaaaaaa

SEQ ID NO: 85 - DNA, 555 bp, Homo sapiens
ccagggacctccgtagtcggtctccctatcccactcccaaacctcagagcaggaaatgggcttggctgagaagattcatgcttgatgaccaggggaggcgtgcagccccccaagaagaaggggaaaagaaaaacggggaggttgaaaagcagagaggtgcaccttcccttctgaggaagcaattctggtctgggaccagttgcaaggggttagtaagagaaacctaaggggtgcttacatttttattctggcaaatgaatctcttaaaaggctccctcctaggggtgcttacatttttattctggcaaatgaatctcttaaaaggctccctccttcgttcgggggaacagcacatgtacctgtgtcagcgtgagatgcaatgctacacaagaacgtggcattgggccaatcatgtggacccctgtgctgctcccaagggagaggttctgtttgggtgtgggataaatctaaacaagcatacactcgtgttatatgtggccttaagggtaggggagcaaaaggaatggacttctctgtagagcagctcaagaggga

SEQ ID NO: 86 - DNA, 614 bp, Homo sapiens
gagaacatgatgaactcatttattactcaaatggttgcattccattcaagagcacttaatacagaccattcaagagcacttaattgattgaaattaaagagaccaattggcatgggacttttaaaaatacaacttattccttttaagttattacttaaactatctagatcttctacatattaaaatagaagtgagaaaatagatctttggaatctagagtctagagtgaaggctaaaaacctgatatggaattggcatgatcaatccagactacggctaaaatgcaagagaacaggtcaggagttgatcaaagtttcaaaatttgtcacatttggtggaaaaataaaacactaaatgcatgtgcctgtgatgatcaaacggcataatattcttcagaccaaaacatatcctgaaatcttgaacattcaacttctgagctcatttctagctcccgaaagggggttgcaaaatccaatgggattgcatctacagtgaggccgctctctcactgctgacaaaatactctgctttttggcaatggcaatgataaacaagtagatgatgagaactcccgatgctttttgagaatcaagggttgctgatcttgaaaatct

SEQ ID NO: 87 - DNA, 833 bp, Homo sapiens
gaattccaaaatatgtaaggctttcaatttattacagatcacccaagaacataatgatatacatgtagtcagaaaacacgatgtagaaatcatagtgagttgtccagacatggtcagtagattattctttctggcatgctccagtgtcaacactcaataaagagcactaaaatccttccatacaattaagtatcagcgatgtaccatattgcagaaaggggtggctgagcaacagtttgttgatactataagacttccatgctcaacagtcgtagcgttgcactcagcacagctctggtttccatatacaaattttccatctcgagtggttactacaacccaggcacaaatctcatcaggataagtctgacatttctgtcttccaacatgacaaaatcctgtagaatcgaagctagtacgctcggtgtctggggtatgagggtcctgcaaacccgaggcttcggctcggactcgtcggagagcatggattcgggcgctggctccatccgagaagctggtggggccttcgggaaacgagagaaggctgaagaggatcggtacttccgagagaagactagagagcagctggctgccttgaagaagcaccatgaagatgagattgaccaccattcgaaggagatagagcgtctgcaaaaacagatcgaacggcataagaagaagattaaatacctaaagaatagtgagcattgagtgcacacagtcagtctctcacagagtggccagtatcattccccacttctatagagattgttttgaatgattgatgtttgacctgtgtgctactaacagataataaattatcaccggaattc

SEQ ID NO: 88 - DNA, 2697 bp, Homo sapiens
cgtcccctgcggtctcctctgtgtgccatggacggcatcgtcccagacatagcagtcggtacaaagcggggatccgacgagctcttctccacgtgtgtcagcaacggccccttcatcatgagcagctcggcctcagcagccaacggaaatgatagcaagaagttcaaaggtgataacaggagcacaggagttccttccagagtcatccatgtccgaaagctacctagtgatgtcactgagggcgaggtcatctccctggggctgccctttgggaaagttaccaacctccttatgctgaaggggaagaaccaggccttcattgaaatgagcacagaggaggctgccaacactatggttaactactacacatcggtggcgccagtgcttcgtggacagcccatctacatccagttctccaaccacaaggagctcaaaaccgacagctcgcccaaccaggcacgtgcccaggcagccctgcaggctgtgaactccgtacagtcaggaaacctggccttggcagcctctgctgctgccgtggatgcaggaatggcaatggcaggccagagcccagtgctcaggatcattgtggagaaccttttctacccagtgacactggacgtgctgcaccagatcttctcgaagtttggcacagtcctgaagatcatcacgttcaccaagaacaaccagttccaggcgctgctgcagtatgctgaccctgtgagcgcccagcatgccaagctgtccctggatggccagaacatctacaatgcctgctgcacgctgcgcatcgacttctccaagctcaccagtctcaacgtcaaatacaacaacgacaagagccgagactacacacgccctgacctgccctctggagacagccagccatcactggatcagaccatggcagcagcctttggcctctctgttcctaatgtccatggagccctggcacccctggccataccctctgctgctgctgctgctgctgcagccggccgcattgccatcccagggctggcaggcgccgggaattccgtccttttggtcagcaacttgaaccctgagagagtcacaccccaaagcctctttattctcttcggcgtctacggtgatgtgcagcgggtgaagatcctgttcaacaagaaggagaacgcacttgtcgagatggcagacggcagccaggcccagctggccatgagccacctgaacgggcacaagctgcatgggaagtcagtgcgcatcaccctgtcaaagcaccagagtgtgcagctgcctcgtgagggacaggaggaccagggcctgaccaaggactatggcagctcaccgctgcaccgcttcaagaaacctggctccaagaactttcagaacatctttcctccctcagctaccctgcacctctccaacatcccgccctctgtgtcagaggatgacctcaagagcctcttctccagcaatggcggtgtggtcaaaggcttcaagttcttccagaaggaccgcaagatggcactgatccagatgggctctgtggaggaggcagtgcaggcactaattgagctgcacaaccatgacctgggcgagaaccaccacctgcgagtgtccttttccaagtccaccatctaggtgcctgtgggcctgcgaagcttccgccattccagaaaagccactttaaaaagcagctgaagtgaccttacagaccagagatttatttttttaaagagagatcagtttacctgtttttaaaaaaattaaatctagcccactttgccgtggcaggaaatggcttgggccacagaggcccaggcccagcaaccatgccttgaggggcttaggcgtgaggccacagcggtgccccaacacagccgcttctgtgccttacaaaaccagcgtgcctcacggccgcacacccaccctctaaggccaccagttgtctctagacctgcagtgagccaggcggcctatacttaggctccccaatgccgtgtaagagctggggccactcccctacacccattataatcaagtgacatgattctcccatgtccctggccagcccagagggcccaggccgtcctcagcgccgagccttgtgtgaccttgtattctattccgtggggtcacagacacctgtgcctagcaatctttccacttgaccaaatacccgagtcttttccatttatatgcaagagatagagtttttaagtaactttttatagcagtggtacaattgtatgtgtgtactctaagcttctctgtcccctgcactccttccttccagtgaccaacttgcaggtgggcccaggccagggctggagaagaagctctgaggcttgtgggtgtcctaccttcaaattttggaccaaagttttgttctctgcccgcctctgactatgcccagttgaggggctgacctctaggccttaatgtccttcctggacgcccacctccatcctagcctgtttctatgggaggggttccctgcacctcagtttctgtgaaagtcatggaagagtgtaaatatttatgattttatacctgtggggctgaggcggtgcagcattttttatggtgacagatgtatattttggtaacgactacaggctcagtattgtcctgggccagccctagccacatctaccccagcccagatggtgtattggggggagggggactttccattaaagcagtttataacctttg

SEQ ID NO: 89 - DNA, 1356 bp, Homo sapiens
atgaccagcaaggttcccgaggaggagcacccatcggtgacgctcttccgccagtacctgcgcatctgcactgtgcaacccaatcctgactatgggagtgcggtcaccttccttgaggagagagcccgccagctgggtctgagctgtcagaaaatagaggtggcgcctggctatgtgatcactgtgctgacttggccaggcaccaacccgttgcttcattccatcttgctaaactcccacacagatgtggtacctgtcttcaaggagcattggcatcacgacccctttgaagccttcaaggattccgagggctacatctatgctaggggcgcccaggacatgaagagtgtcagcatccagtacctggaggccgtgagaaggctgaagagcgagagccaccggttccccagaaccatccacatgacatttgtgcctgacgaggaggtcggaggtcacaaggggatggagttgtttgtgaagaggcctgagttccaggctctgcgggcaggctttgctctggatgagggcctggccaaccccactgatgccttcaccgttttttatagtgaacggagtccttggtggatacgggttaccagcactgggaagccaggccatgcctcacgcttcattgaagatacagcagctgagaagttgcataaggttgtaaactccatcttggcattccgggagaaggagaggcagaggctgcaggcgaaccctcacctgaaggaaggggccgtgacttcggtgaatctgactaagctcgagggtggtgtggcctataatgtggtacctgctaccatgagtgcctgttttgacttccgagtggcgccagatgtagacatgaaggccttcgagaagcagctgcagagctggtgccaggaagcgggagagggggtcacctttgagtttgctcagaagtttacagagcctcgaatgacacccactgatgatacggacccctggtgggcagctttcagcggggcctgcaaggaaatgaacctcactctggagccggagatctttcctgctgccactgacagccgttatatccgagcggtggggatcccagctctgggcttctcgcccatgaaccgcacacccgtgttactacatgaccataacgaacgactgcacgaggctgtgtttctacgtggagttgacatatatacacgcctagttgctgcacttgctagtgtgcccgctctgcctggtgaaagctgagccccaggccttccaaccctcatagctttcagcccaaccactgccaaggatctgttgcccccgcccagtaataaagccagtgttgaatgggatgttcttcaaaaaaaaaaaaaaaaaaaaaaaaaaaaa

SEQ ID NO: 90 - DNA, 1555 bp, Homo sapiens
cccagcggagggttccggctgtggccagtacctcagcatctacgcgtcgcccggcaggtccggggctccggtccgtgccggtgcaggcgccggcatgtggctgtgggaggaccagggcggcctcctgggccccttctctttcgtgctggtgctgctgctggtggtgacgcgcagccccttcaacgcctgtgtgctcactggcagcctctacctcctgctgcggttcttcagcttcgagccggtgccgtcccgccgggccctgcaggtgctcaagccccgtgaccgcgtgtccgccatcgcccatcgcggcggcagccacgacgcgcccgagaacacgctggcggccatccggcaggcagctaagaatggagcaacaggtgtggagctggacatcgagtttacttctgatggagttcctgtcttgatgcacgataacacagtagataggacaacagacgggtctggccgattatgtgatctgacatttgaacaagttaggaaacttaatcctgcagcaaatcacagactcagaaatgagttccctgacgaaaggatccccaccctgagggaagcagttacagagtgcctctgccataacctcaccatcttcttcgatgtcaaaggccatgcagatatggcttctgctgctctaaagaatatatacatggaatttccccagctgtacaacaacagtatggtctgctcattcttgccggaagtcatctataaaatgagacaaacagatcagaaggtaatcacagccctgactcacaggccttggagcctgagccacactggagacgggaagcctcgctacagcgtcttttggaagcagtctgtgtttgtggtgttggacatcttgcttgactggagcatgcacaatgtcttgtggtacctgtgtgggatttcagccttcctcatgcagaaggattttgtctccccggactatttgaagaagtggtcagccaaaggaatccaggttgttagttggactgtcaatacctttgatgaaaagaattactacgagtcccaccttgggtccagctacatcactgacagcatgctggaagactgtgcacctcacttctagactccccaggaggaaacacagatgcaaaactgcctggaggccttttgcagggacacgagaacactctgttagcacaagccctgggaatcctgcggctcatactagcaatagccacagttttaccccaagcagaaaccaggcatggcgaccatgctccaaggaaggctccacacttgcccttaaaattctggatctgtgaaaaggcagggtggccctacccaaccccgctgagggtacagagccacaaggatgagcagagtgggtcctgcaattagggcgcaggcaccaatgcatgggcttgcatgatcactccaagttgacattttaaatcttgctatacttcagtaattcacttatttccaatatttgtcgtcagctctgttaatggcgacatgtaggtgtcaaacttgtgaccatactaataaaatcattgaaaggtgaaaaaaaaaaaaaaaaaaaaaaaaa

SEQ ID NO: 91 - DNA, 1555 bp, Homo sapiens; identical to SEQ ID NO: 90

SEQ ID NO: 92 - DNA, 583 bp, Homo sapiens
ccggccgccaaacattttttttatttttttttttttttttttgccagtgaacacacacacaggagtttttattttatgcatgtcgtgttttgtctgcaacatatgatgtatcagctgaatgcctggtctcctgggagcccaggaaagggcatcagatcttcacagaccaaagttagagacggttgtgagctgccatgtgggtgctgggactttaacctgggtcctttgccaagaggaagccgtgcttttagccaagtcgtctctgcggtccctcttgggtatctccagcaattcttggccagctctgtccgtctgatccatggtgtgatcccctcattccctccccatgaggagagctgaggacacggaggttcaggcacagtatccctaggctacagccctgccatagtcagtgtcacggggccgggtgacaggtgagggcagtagttctctttattttagaaatgggggtggctgtacatattaaaagtgccacagagtgattcgaacttgaaaacttacagaaagaaatgttccctgtcccccgccccatagtcataccctctgaggtaaggctgcacca

SEQ ID NO: 93 - DNA, 3771 bp, Homo sapiens
caggggctgccgtgcaaagtgcgcgggctgctgtcctggccaccgccaaagccatggcttccaaactcctgcgcgcagtcatcctggggccgcctggctctggcaagggcacggtatgcgaaaggatcgcccagaactttggcctccagcatctctccagcggccacttgttgcgggagaacctaaagaccaacacggaagttggtgacgtggcaaaacagtacctagaaaaaggtcttttggttccggaccatgtgatcacgcgcctaatgatgtcagaactggagacccggagtgcccagcactggctattagatggattcccaaggacattagtgcaggcagaagctctggacagaatctgtgatgtggacctagtaatcagtttgaatattcctttcgagacacttaaagatcgtctgagccgacggtggattcacccttccagcgggagggtctataacctagacttcaacccacctcaagtgctgggggttgatgacatcaccggcgagcctcttgtccaacaggaagatgataaacctgaagcacttgctgcccggctaagacggtacaaggacgcagcaaaaccagtcatcgaactgtacaagagccgtggagtgctccaccagttttctgggacggagactaacagaatctggccttatgtttacacgctcttctccaacaagatcacacccattcaatccaaagaagcctactgagcctgccatgggaagagccaagaagacatggttgcccactcaatcatgcgtgtagtcttggtgccctggccgagttagaagccagctgagatagcttgcagcatcttttctagtttgagtgatgatgtaatgaggaaaatctagtaggtagaaagagttcaggaagaaggaaaccctcctctgcctttgaaaagaggctctgcaggagcatcacgcccttcacagagaagagtgtagactggctttccactagtgttgcacctacactcttcggtgggttaacagccatgtgctcgccatcagagcctttttgcatgcagtggtgggctctcccggtttatcccacctcccacaggtgattaaaccacagcactgtatgcctgagaacttgaagggctgtggtcctggcttgtccactgccatacgctctgacaattgacgctaattgcactcagtggttgctttaccccggtcgtccgtcgtccgcccccccccccccccccatctctcagcatcctagtttctattgtctgaatcttctcatctgcttgctcccttctcaggctattcaggaccgtgatagcttctgcatttatcccctccaacttcctttttacaaactgagaggtaggtgactggattcagtcttttccttctcactaggaactgacccaggctttcttggttaaacagctgctctttcttgagcacactctgtaccttttattgtttaaaaaaaagattccccccaagtcttcagggttctcaaaaacaagggaaatgcttacttgtggaaatatggggtgattgtatctctctgtagcagtcgtagtaattgtatggaaatcactggactaatgagatggttgggctcaaggcaagatgggtattgaacatgctgctaaatattaacgctgtcagtgtttttcttctgtgagtgactaaccggacggcgagaggtcagtaaagggagcaagcccgaggcttggggcgtcttgcactagatatgcatagcacctgcactgagtaagacagctttaccgtttggggaacgcagaatctttttgtttgttttcttcctattccaaagatgcagtctttaggtggccataaagtccagaaatgaagagactaatattttaccagtcattatgagtcaagaaagcatttgttcaaagactctcctccctggattccagacttgttggccacctcgttataacttttactcctctctgggaagagcagggaaatgtcttcccactgccttaaaaagctgtcctgcatctacctgtccccaggaggcagttcttcattactggtggtggtttagtgtgacatctcatagtctgtctggggtgggcgtgtggggcgggcttagcactttagtggaatggagacattattccattctgaaggtgtcgtgtgaatccccagtctgttcactgccatgcgctctgtgctaacaagtctgtctttctgccttcatgggccgcctggactctggttcctcttggtcgtcctctcatgtgcatgttctatggctgccttggtggagatgcaggccagcatcccccactcgtgctctccgtgcagagaaataagcgtcggaagtggagcagcatggtgcaggtctgtgaccatctgggcatcttcatggtgctgaatgcttgggaagctcacatttggatgtcacttggtaggggttgggtgataaaagcccaggcttcctggaggagcaggtcaagagtgagaaaccctgagattattcccagggaccaagggaagtagagagttaaagggattcagagtaatccaagagaggtgggaaaacttcaaacttatttctcttcctcttgtagagtctggggagagcaatagggtgtgagcaggtccttgcctgcacactcttgtttctttatgcatttcaagcttaatcgactatggtagccagcactgggacaccagggtcaggagagcagcaaggggcaaaaagatcttttccaaagtcttgggtgatttcatgtccattggtgttaaggtgttttctgcagcagacttggctgttcttttctaaaggattttggagacatagacattaattaatactgaaaatgtcttgacagaggtagaatggaaggaacaccttttccttctcaggccatggccttccttcaggtggaagccaagaggccgggtggtctttatattcgcaggctccaccccgctcctcgttgagtttgcttcccacaatcctcttgcttagaacttgggaaagagcatgtttattcctccagtatttatgacaaaaaggtgctatgaaggaggccttctgaatgaagtgcgcactctctttataagccttgtggtgaatcttcccaggcacaaccaattttccctataaacaagagtccaggatatgaagtcttgcctgggctcttcatatgagtaaacagtagagctatgacttagtcccaggtttccctgcttcagaaactcttggccttttactggatgttagctgtctgtcttggcctaagcaacttggggctatgagcctgcttgtgggctcagggagagtgacagacatcactggagtggcggcatgaggctatttcttttgtattctctgcctgagcaaaaggggttgctaagtacaaggctttaaggcaaggttgggtttggaccaggttaatctgcctcaattctaggtgtcaggaagccatgaagccatatgaaggaaaactggcatctactgaaacattaaaattaaccataaatattaccccttatatttggtgtggcaaactgcacaattcttgccagaataaatgccatcagctgcctcagggcactcctcggtttgaccattctgtacgtggttgggtgtgagagacaggctaagtgagtaagccattgcccacggctccacatggactccctctagtgacagacaattgtaggaagcacaacatctttcaataaaagactcttgtttaaaacctttaaaaaaaaaaaaaaaaaaaaaaaaaaaaaaaaaaaaaaa

SEQ ID NO: 94 - DNA, 487 bp, Homo sapiens
  misc_feature (451)..(451): n is a, c, g, or t
ggaaatccaaactattttttaaaacaaaatattatttaaatattatgaatctctgaagtcatgagacttatctctccaaaagggaaggacccatggtttctattttttatgcagcattttcaaatacacatgtcaatatatatttcataaactactaaaaaataaaaccctttatcctctgaggttattgatgtgtcctaggtctccaacacatctcattaaacagtaagttctattcatcttcatgaatgaggtgggaactagactaaaaaataggattttaatccctgaggtgtcagttaaaatgcagaggttgccaagattttttttttcatttaaaaattagctttaaataattagcatggatcatgctatctcaatcaaaaccacttcctctacacggagtcctttagaaaattacattttctgggttatggtcaacctgatgtcncagctctccagctatgagactttttttttccttttg

SEQ ID NO: 95 - DNA, 592 bp, Homo sapiens
caggcaagagcacaactttattttcacctctaaaagtaaaccacaattgataacaacaaaggagactgtgcagttcaactttttattttaataaaaccagaatatgcagagcacatgcggtgctagcatctaaactaatacaataagcaagtactaaagctacagtgacttgagggtcaatctttacgttcagcaagtttaaacccattcttaactttgaaacataactgaaaacattgcttgctgataagacttgctccaatgctatcgctgaatgtccaagtcactgaatatgccaatacaacaaagataaccacatgtttgaggattgcaatgtgccagacattcactgaaaaaaaatacaactaaacaaaactcacacaacaaacatctgagaatctggacactttgtatcagtgtttttgaagtgtttcattaatatcttaagacaagtgtatcaaaaccttggcatgatttagtttcaagtcgccaattttgtttttactaacatcagaaagttatggctacaccgccaatgccgggtctgcttaatttgacttaagagtttattatggcttaacattaaaagctc

SEQ ID NO: 96 - DNA, 433 bp, Homo sapiens
cagggctaaggacctttattgagcacacggcccctgatggtgctgacggagaaaccttaggctttccttcccagcagcctccgccacagttcttggctgagtagtgcctgctccctccgggcgccctgcagcacactcctgttctcctgggctcttcggatcaggtaggatatcacctcttccaggcagccataggggatagacttatataccatgtatccagcttgccctaatgccagggagacgtggtcacacatgcccagaagttgtccgaagcagacaggcccatccagaggaatgcccagctcccacatgctgcagaaagggtcacattgtcaatccagagagtggctacagcgcctcgttgcctggcgaatggattcttcattgtgggaagccacatgaggtggcaccggggaccgtggttggacac

SEQ ID NO: 97 - DNA, 364 bp, Homo sapiens
cggaaagctgcagccatggccctgcgctaccccatggccgtgggcctcaacaaaggccacaaagtgacgaaaaacgtcagcaagccgagacacagccgccgccgcgggcgcctcaccaagcacaccaagttcgtgcgagatatgatccgggaggtgtgcgcgttcgcgccctacgagcggcgtgccatggagctgctcaaggtgtccaaggacaagcgagcactcaagtttatcaagaagagggtgggcacgcacatccgcgccaagagaaagagggaggagctgagcaacgtgctggcagccatgcggaaggcggcggccaagaaggattgatgacccctcccccaataaaagatggttctta

SEQ ID NO: 98 - DNA, 632 bp, Homo sapiens
cggccgccaaaatttttttttttttttttttttttttttttaggtacgaggctgacgccagataagtttttattatatttaaaaaacagtggagctggaagtaagggcgggtcgttgaaggcgactgagaggtgaaaggcctcccgttcctcagtggcaggatctggacccactgcctaggccgggtttaatccagccgagatgctggaaagcagagcacacagttgtgcccatcagggcaaagagggcaagagagctcacagctcctcgataccgcttgctagggtctcccgtgtagtagccatatgcgtaaagaactcgcccaataatccacgccacgcccaggccagaagctatgcgcgggtggtaaacacctcccacggttaggaagaataggaagggagggtacacctccaacgtgttctggtgggcgcgctgaatgcagttgaacatatgcccattctcaggatctgtgctgtacatgacagggtactctaccttgtacttcttgcgggctttgcccacgttgatggctaagtggagcaccatcacaaagctggcggcaccagtgagaagcacgaatccatattccttagagaggacagccatcttggctctggctcaccttgacg

SEQ ID NO: 99 - DNA, 627 bp, Homo sapiens
aagcattcagacactttgaggtgggaaagatgatacgcaggttgtactacaagattcaatggaagatgtcagacaggacatctggtacagacgcagcagcacaacccaacacaggttagatgagagcgcttcatccggaagaaacttaaaagaataatttaaagctctgtgagacaagatatgttccaattgaaaacactaagaaacagtaccattgatggaaaaaggaaaacttctatgtgtaccaaaaggggcgcagggtgaacgagagggaaatttgcgtctgttgaggtacaaatgggagtgttccacgaggggggggataattattattaatgacagaccctgtaaatacaaaataaaatccaaatcactggtcacgaacttcaaatttacacgtaataaaggcaaggcaataagactcgagttctggcctgtcaaatatttactccacagacattatctacagaagcacttggccaacgtgtacacagtgatccttatgcacgccaaaagggtttcggtaaaaatgacgctatatacaatctgtacaccgatccaccagagcgactctccgtctcccgggggaagagctatcaatacaaagagatacctgaggttgcgtct

SEQ ID NO: 100 - DNA, 644 bp, Homo sapiens
aaagagagaaatggtttatttggtaacaaggaataaaaagaaattctttaattcttctctcttgtggtggttggactgcagtgtccagtgggcgggcaccacacaggaacccctccctccctcagaccagatctgctgctcaagcgcaaaggccatagttgcatagtcttctagacagaggggctggcctctgtgctttctggggtctcggtggctgttgcagtttccttcttgtcttcaggcttcatggcaggaaagagaagtacttccttgatattgttggagtctgtgagaaacatggtgactcggtcgatacccatgccccagccagctgttgggggcagcccgtactccagggcagtacagaagttctcatctatgaacatggcctcatcgtcaccagcagccttggccttggcctgttcttcaaacagttgtctctgccgcacggggtcgttcagctcagtgtacgcattgcatatttccttcttcatgacaaacagctcgaagcgctcagttagaccctctttgcaacggtgccatttggccagaggactcatgatctgtgggtgatcacagatgaatgtaaggctgatgcatgtcacttcgaggaactctcccacaagcttatcaaggagcctggc

SEQ ID NO: 101 - DNA, 499 bp, Homo sapiens
cccacttaaaacggaaacacctttattgacagtataggacagttaaaacgcacgcaaggacaaagatgagaccacagaggtgtaaagttgcagcacaggagttaatattcttcaccctcatcgtctccttcagcactatctgccccaacctcctcataatccttctctagggcagccatatcctcacgggcctcagagaactccccctcctccatgccctcacccacataccagtgcacaaaggcacgcttggcatacatcagatcaaacttgtgatccaggcgagcccaggcctcagcaatggctgtggtgttgctcagcatacacacagctctctgcaccctggccaggtcgccaccaggtaccacagtgggaggctggtaattaatgccaaccttgaagccagtggggcaccagtccacaaactggatggtacgcttggtcttgatggtggcaatggcagcattgacatccttggggaccacatcaccacggtaca

SEQ ID NO: 102 - DNA, 605 bp, Homo sapiens
ctctgatatgaaaattcagaaaggatttcatgtccctgcaaagtctggcctccgagaaggagcagacacttctacacttgatcttagccaaaaagccgagaagcgatggagcagacacttctaagccaatgagtcagatttatgactatgatccaagaagggatatggcgaactccaaaggccatctttagaacatgtgtatgataagaaggcccccaacccctcttttggctaatgatgactctaacgactgctgactcaggaattcagttactgctcaactggaatactgtcaacatttttctactcctaaaaggaatgtgcctaaagttcaaattagaaccttttttttgcagagagaagaaaaagctgaggattcctgggggattacaatcacttcaggaaagatgtagcagttgtcccaacattgaacgagttgtgttacatttagagtcagtatgcagtaatgacagggtgagtgtcggaggtcggggggacggtctgaagaaaagagcttctgtttcaacaagacagttacaaataacgtattaccacaagccactctctaaagtccgttccagccatagtgtttgatgactgttggg

SEQ ID NO: 103 - DNA, 508 bp, Homo sapiens
gaagggaggtgttggcatttatttctggagcagggcctcagcactggacacaattatgcatgaagtcaacacacagacttgtatagtaagtaggatagtctcggaggtggctgacatgcgcagatgtcacgaagtccactccgcgcactgagacctggtgagccaggcgttcctccaccatccgttccacatccctggctgagaccaccttatcagctctagagtagaggtagagctcgggccagcaggagcctgaatcctgcagcctgtcgtagaagtgggtgtggaagagggccgtgaatggagcaaacaggaagtggaacaggaccaccaccagcgcaaatgctgccaggagcaacaggcgaagcacggcaggtctgcgctccaggatggttgccagggccctcagggcccctatcaggtcgctatccccagggccactgtcaaagatggtgcccaccacatgcaaatggcggaagcgctgatgggtctgaatgagctccagcac

SEQ ID NO: 104 - DNA, 1320 bp, Homo sapiens
gggctctatcggcggcgtgtggcggcgagatgtctcacaggaaattctcagctcctaggcatgggtccttgggcttcttgcctcggaagcgcagcagccggcatcgtggaaaagtgaagagcttccctaaggatgacccttccaagcctgttcacctcacagccttcctagggtacaaggctggcatgacccacattgtccgggaagttgaccggccaggatctaaggtgaataagaaagaagttgtggaggctgtgaccattgtggaaaccccacccatggtggttgtgggtattgtgggatatgtagaaaccccacgaggcctccggaccttcaagactgtatttgctgagcacatcagcgatgagtgtaaaaggcgtttctataagaattggcacaaatctaagaagaaggcttttaccaagtactgtaagaaatggcaagatgacacaggcaagaagcagctggagaaggacttcaacagcatgaagaagtactgccaggtcatccgcataattgctcacactcagatgcgcctgcttcctctgcgccagaagaaggcacacttgatggagatccaggtgaatgggggcactgtagctgagaagctagactgggcccgagagaggctggagcagcaggtccctgtgaaccaggtgtttgggcaagatgagatgattgacgtcatcggcgtgacaaagggcaaaggctacaaaggggtgaccagtcgttggcatacaaagaagctgccccgaaagacccacagaggtctgcgcaaagttgcttgtattggagcttggcatcctgcccgtgtagccttctctgtggctcgagctgggcagaaaggctaccatcaccgaacagagatcaacaagaagatttacaagattggtcaaggctacctcatcaaggatggtaagctgatcaagaacaatgcatctactgactacgacctgtctgacaagagcatcaacccactgggtggctttgtccattatggtgaggtgaccaatgacttcatcatgctcaaaggctgtgtggtgggaaccaagaagcgagtgcttactctccggaagtccttgctggtccagaccaagcgtcgggctcttgagaagattgacctgaagttcattgacaccacctccaaattcggacatggtcgcttccagaccatggaggaaaagaaagcattcatgggaccgctcaagaaagatcgcattgccaaggaggaaggtgcctgatgccaggagtactttgtgcagctggtggggtctcatcaataaaatatttccaaaaaaaaaaaaaaaaaaaaaaaaaaaa

SEQ ID NO: 105 - DNA, 1547 bp, Homo sapiens
gacggctgccacctcacacagcttctgataccttggagcactcttctcccttggctgtacctgtcatcatggctcaccgatttccagccctcacctcagagcagaagaaggagctctccgagattgcgcagcgcattgttgccaatgggaagggtatcttggctgcagatgagtctgtgggcaccatgggaaaccgcctacagaggataaaggtggaaaacactgaagagaaccgaaggcagttccgagagctcctctttagtgtggacaattctatcagccagagcatcggcggagtgatccttttccatgagacgctctaccagaaggatagccagggaaagctgttcagaaacattctcaaggagaagggaattgtggtgggcatcaagctggaccaaggaggtgccccgcttgcaggaacaaacaaagaaaccaccattcaagggcttgacggcctctccgaacgctgtgctcagtacaagaaagacggagtcgactttgggaagtggcgtgctgtgctgaggatctcggaccagtgcccttccagccttgctatccaagaaaacgccaacgctctggctcgctacgccagcatctgccagcagaatgggctggtacctattgttgagccagaggttcttcctgatggagaccatgacctagagcactgccagtatgtttctgagaaggtcttggctgctgtctacaaggctctcaatgatcatcatgtttaccttgagggcaccctgctaaagccaaacatgctgactgctggacatgcctgcaccaagaagtacacacctgagcaagtggctatggccaccgtcacggctctccacagaactgttcctgcagctgtgcctagtatctgctttttgtctggaggcatgagtgaggaggatgctacacttaacctcaatgctatctaccgttgccctctacctaggccctggaaactaagcttttcatacggcagagccctccaggccagtgcattggctgcttggggcggcaaggctgcaaacaagaaggcaacccaggaagctttcatgaagcgggctgtggccaactgtcaggcagcccaaggacagtatgttcacacgggctcgtcaggcgctgcttccacgcagtcactcttcacagcctcctacacctactagataccgtcacctaccagccagctccagttgtcctaaatattttggttggagacctcaaaggcttcagtcagccctgaaattagatcacatctgattgaacttttgaaaacaccacatactgcgaatcagctgttgaagtgcggagtatgagcacgtcacccagtagtctccgaacacctccagttccccgtgttccagaacatccatccaagagaaggaacgggctttacatggaaggtcagtcttccatgcatacagccactactgagcaaagcagctcggaagggaaggaggagaagggcattttaacaaacatacttaccgggggttggttagagaagaggcacagcagcagaaaaagaaataaaaagtctatgaaccttc

SEQ ID NO: 106 - DNA, 470 bp, Homo sapiens
aaaacacaagggagagacctggccagtcaacacatgactgaccacagggaaaggagtttatcaaacttcgagagtctaaaaacatacaaatgtgtcttctgtctacagcaattgtctatgctttcccacacaccgactggtaccctctgcccagtcacacacagtgaggacagcaggtcagtgactcacgtcctaagcagttttctgctgccccttctttccgatcagagacttgtggatgtgcggaatcacaccgcccccggctatggtagccttgatcagtgaatccaactcttcgtcacctcggattgcaagctgtaagtgacgtggggtgatgcgctttactttgagatctttagaagcattacctgccaactccaacacctcagctgtgaggtactccagaattgcagcactgtacacagcagcagtggcgcccacccgtccatggcttgtggtgcgagtcttca

SEQ ID NO: 107 - DNA, 547 bp, Homo sapiens
gacacagacacaaaggcagctgtggtaatggggtgggggacacaaaagcaaaaatcacacttcctacatggaggcctcaattagacaagagagaggctgggtccctcccctcacactccttctgacagtggctggagtaacagctctctctaatccaagctcagaagcagcaggtgacccccacctagcctcaaaggtccccactttggctccagaagcccctgtccttttaaccagcccagtaattcccctacccgagctccttctcccccaccagtgtaaacagagtttggggctgaacaacagagctctgggaaggcaggagcctcctagatagcaaagggaatgtgcttggagtttcacttcggtcccagaatgagacccagcagtgtctcccagaactcgggctgatccagtatactgcctcttcattctccaccactgacagagataggccaggccccagaccacagtaaaaacaattgatccccagaggttagagctactccctacccccgacccctggcacatacacagatttttggca

SEQ ID NO: 108 - DNA, 1744 bp, Homo sapiens
ggcggcggctcgggcagaatgcgggtgatcagcatggctcgactagtgctcggtctggtgagctgtaccttctttctagcggtcagtgctctctattcctccagtgatgatgtcatcgagttaacgccatcaaatttcaacagagaagttattcagagtgatagtctgtggcttgtagaattttatgcaccatggtgtggtcattgccaaaggttaacaccagagtggaagaaagcagcaagtgcactgaaagatgttgttaaagtcggtgcagtcaatgcagataaacatcagtccctgggaggtcagtatggtgtccagggatttcctaccatcaagatatttggagctaacaaaaacaaaccagaagattaccagggtggcagaactggagaagccattgtagatgccgccctcagtgctttgcgccagcttgtgaaggatcgccttggtgggcgaagtggcgggtacagttctggaaagcagggcagaggtgatagttcaagtaagaaggacgtggtcgagctgacggatgacacctttgataagaatgtccttgacagtgaagacgtttggatggttgagttttatgctccatggtgtggacactgcaaaaacttggagccagaatgggctgctgcagccacagaggtaaaggagcaaacgaagggaaaggtgaaattggcagccgtagatgccaccgtgaatcaggttctggccagccggtatgggattaaaggattccctacaatcaagatatttcagaaaggcgagtctcctgtggactatgatggtggacggacgagatctgacatagtgtcaagggccctggatttgttctctgataatgcgccacccccagagctgctcgagataatcaacgaagacatagccaagaagacatgcgaggaacaccagctctgtgtggtggccgtgctgcctcacatcctggacaccggagctacaggtagaaactcttacttggaagttcttctgaaactggctgacaagtacaagaagaaaatgtgggggtggctgtggacggaagctggagcccagtatgagctggagaacgcactagggatcggagggtttgggtaccctgccatggcagccatcaatgcccgcaagatgaagtttgctcttctcaaaggctctttcagtgaacaaggcatcaatgagtttctcagggaactgtctttcgggcgtggctccacagcacccgtagggggtggttccttccctaacatcactcccagggagccctgggatggcaaggatggcgagcttcctgtggaggacgacattgacctcagtgatgtggagctcgatgacctagagaaggacgagttgtgagggccacagcccggccttcaaatgtctttccttgggaatgagcagttttccagcaggaagttcttccggtcagctgtctgcactggcctttccgagcagtactcgccggccactggaaactgccaacagtgaacctcagcgtctcaagaaaacactgaagaattctatgaattgtagcagtgaattggattgtattctctggcatattttgaagaaaattgggctattgaaacatttttccctcctgactgctgcttgaatgttcttggaagctgtttcgtatgtatagggtttttaaaatgtgattcctttgtttgaatattaatggctttttccattaaagaataaaatgatattttggacaaaaaaaaaaaaaaaaaaaaaaaaa

SEQ ID NO: 109 - DNA, 644 bp, Homo sapiens
gagatatattaaaagactttattcacaatagagaaattttacaaatataatttttaaaaattatgtgtcaatctattatgttttccgtaacatcagagatttatataaagttggaaacaacagaatgcacttatgaacaaatcaaaaacaatgtagaagtggatggatacacacgacagagaagtcactgagttctctaaatgagcacacaacttataggtataatattaactgcacaaagtataccaaaacatgttttgtaaacacaaaatcgggtgctaccttaactgctcacctttaagggcgtggatcatacatgtaagtcaaattgcacagctttgttggaaatgaatgactcgtcatctatttggagacttccgttgcttaaaattgacacaagataaaagcctaatcaattacgctactataaaatttgtctcttatcgcgtttaaatttttggtgttctgtgatctggcattaaaaaacagtccaagttttaaaacagaaaacattgctcgccagttggagagtagctcgtggttcggcttcctccctgctcgaaccggaacaaacgctacagtaccgtggagcaggcgcacaggacctgacgttcgcgtcccaaccgctacagaaatactcacca

SEQ ID NO: 110 - DNA, 2260 bp, Homo sapiens
atgtcacagtggttcgagcttcagcagctggactccaagttcctggagcaggtgcaccagctgtacgatgacagtttccccatggaaatcagacagtacctggcccagtggctagaaaagcaagactgggagcatgctgcctacgacgtctcgttcgccaccatccgcttccatgacctgctctcccagctggatgaccagtacagccgcttttctttggagaataatttcttgttgcagcacaacataaggaaaagcaagcgtaatctccaggataacttccaagaagatcccgtacagatgtccatgattatccacaactgtctgaaggaggagaggaagattttggaaaacgcccagcgatttaatcaggcccaggagggaaatattcagaacaccgtgatgttagataaacagaaggagctggacagtaaagtcagaaatgtgaaggaccaagtcatgtgcatagagcatgaaatcaagaccctagaagacttacaagatgaatatgactttaaatgcaaaacctctcagaacagagaaagcgaagccaatggtgtggcgaagagcgaccagaaacaggaacagctgctgctgcataagatgttcttaatgcttgacaacaagagaaaggagataattcacaaaatcagagagctgctgaactccatcgagctcactcagaacactctgattaatgatgagcttgtggagtggaagcgaagacagcagagtgcctgcattgggggaccgcccaatgcctgcctggatcagctgcaaagctggttcaccattgttgcagagagcctgcagcaggtccgtcagcagcttaaaaagctggaggagttggaacagaaattcacctatgagcaggaccctattacaaaaaacaagcaggtgttatccgatcgcaccttcgtcctcttccagcagctcattcagagctcctttgtggtggaacgacagccgtgcatgccaactcaccctcagaggcccctggtcttgaagactggggtacagttcactgtgaagctgagactgttggtgaaattgcaagaactgaactataacttgaaagtgaaagtctcatttgacaaagatgtgaacgagaaaaacacagtgaaaggattccggaagttcaacatcttgggtactcacacaaaagtgatgaacatggaagaatccaccaacggaagtttggcagctgagttccgacacctgcaactgaaggaacagaaaaatgctgggaacagaaccaatgagggtcctctcattgtcaccgaagaacttcactctcttagctttgaaacccagttgtgccagccaggcttggtgattgaccttgagaccacctctcttcccgtcgtggtgatctccaatgtcagccagctccccagtggctgggcttctatcctgtggtacaacatgctggtgacagagcccaggaatctctccttcttcctgaaccccccgtgtgcgtggtggtcccagctctcagaggtgctgagttggcagttttcgtcagtcaccaagagaggtctcaacgctgaccagctgagcatgctgggggagaagcttctgggccctaatgctggccctgatggtcttattccatggacaaggttctgtaaggaaaatattaacgataagaatttctccttctggccttggattgacaccatcctagaactcattaagaagcacctgctttgcctctggaatgatgggtgcatcatgggctttatcagcaaggagcgagaacgtgctctgctcaaggaccagcagcccgggacgttcctgcttaggttcagtgagagctcccgggaaggggccatcacattcacatgggtggaacggtcccaaaatggaggtgaacccgacttccatgctgttgagccctacacgaagaaagaactttcagctgttactttcccagatattattcgcaattacaaagtcatggctgctgagaatataccagagaatcccctgaagtatctgtatcccaatattgacaaagaccatgccttcgggaagtactactccaggccaaaggaagcaccagaaccgatggagctcgatgaccctaagagaactggatacatcaagactgagttgatttctgtgtctgaagtccacccttctagacttcagagcacagaaaacctgcttcccatgtctccagaggagtttgacgagatgtccaagatagtgggctctgaatttgacagtatgatgagcgcagtataaacacgaattt

SEQ ID NO: 111 - DNA, 549 bp, Homo sapiens
caacgtttgcagctgtgtggctttgcagcacagcaattcataaaccacactgtacagaatcaccagcaagactggaatgatgttatagaaggcaccatcatgcttattacattaccagagaacaaaatacaggaaagacagtttctactgtacacagtttaaagaaaggaaaggggaggagtgtgttgagcagccatccatccctgtactcaagagggcaggtagaaaactgacaaaacggagctactaaacctggtctagtatttaagaccacagcttttgaagttctcgtttttgttatttcgttcatagctaaaggacttccttctggaatatttgcagtcttgttaaggtttgtgtgcacacgctggtcacagcaagcagatagaatgccctcatcatttcacaaactattctctactggaaaagaagatcaactttttatttccctgttgcctcctggtgcagatttcaatgttaatgacttcagagtacccgacagtgcattctgatgaatacgtaacaagtttccgtttgtgttgggggttg

SEQ ID NO: 112 - DNA, 647 bp, Homo sapiens
ggaattaagaggatttattttaaaagattataaaagttgatattaagagtgataaaaaaagacccacaggctttaaatcaacaaatacaaaagtgatctgatataagcaatgtaaaaatacatttttcctgtcccacataaagcataatttaaagtataattataaaagtcttgtgctgtaagtatatttcccttctaagtcttaaaaaccattctaaacaatttgtataaattacaggaactcaaatctgccacagctactagaaaagacattgtccctactgtgctgacagtctctggttccagtgcttctgcagggtgtttgttgccacagtctttaatatcatctctctccatcgaatccagaagtcaaccagccacaggttcccccaaaagagaaagttctaagagtggccacagacacaagtgaccaaattatcttcctaaaaggaaagcctgaagtggcccggcagagtcccccgctgtgggacactaacacagcaggccagagtgactgtcaatcacgaacaagccacacacgggcagagaggcgcctaccacagagtacaatgtccctaagcacctgcgagttagaagctaggtctcaggatggcactattgcaggcagacacctttaaaggtgggga

SEQ ID NO: 113 - DNA, 647 bp, Homo sapiens; identical to SEQ ID NO: 112

SEQ ID NO: 114 - DNA, 465 bp, Homo sapiens
aagatttacttgtttattttttatatgtatattcatacactgttgctgtcttcagacaacccaatagagggcatcagatcccattacagatggttgggagccatcttgtggttgctgggaattgaactcaggacctctggaagagtagtcagtctcttaaccgctgagccatgtcttcagccttttacgggaaaggtaaatggctcctttgttaaatctgggcagtcgaccacagagacctggacatgagcaaagttgtcctttagccccttctgcaaaacttctgcgagctcctccagacttggcacgtggaaagaaaactcagtgcaagccattctctctcctctcagcaactcagacacagcagctgttggctgacctccaccagagttcacagggcaccagcgtgaacagtccctgctcttgtcacccactgaataaggtgtttgtaatcttccgttagaa

SEQ ID NO: 115 - DNA, 512 bp, Homo sapiens
  misc_feature (448)..(448): n is a, c, g, or t
attagccaaagcacatactttattagctcctgaactctagttctccttctcctgtacagttttggttccacgtagccgtccagtccggcgagcagcaatgagacccactttgcgcccagctggggcatctcttcggatagtggaaggcttgccaatgtgctggtggttaccaccgccaaagggatgctccacaggattcatggcaacaccccgcacacgtggccagcagttcctctttgccttgtacttatggtaggcacggccagcctttaagataggcttgtcaattctgcccccgccagccacgacaccaacaacagctcggttagcagaggaaatgaccttcttggaccctgaaggcagcttcactcgggtcttcttggtctctgggttgtgggagatgactgtagcatagttcccggaggctcgtgccagcttgcccctgtcnccaggcttctcctccagacaacacacgatagtaccctcaggcatggtgcccacgggcaaaacat

SEQ ID NO: 116 - DNA, 1810 bp, Homo sapiens
  misc_feature (1705)..(1705): n is a, c, g, or t
gcggccgaggtacctgagacctcttctgctccagacgcgtccgcggccaggatgaagaggccgaagttaaagaaagcaagtaaacgtatgacctgtcataagcggtataaaatccagaaaaaggttcgagaacatcatcgaaaattaaggaaggaagctaaaaagcggggtcacaagaagcctaagaaggacccaggagttccaaatagtgctccctttaaagaggctcttcttcgtgaagctgagctaaggaaacagcagcttgaagaactaaaacagcagcagaaacttgacaggcaaaaagaacaagaacgaaaaagaaaacttgaaattagccctgatgatgagcaatctaatgtggaaactcaggaggaatctgatgagcccaaaataaagaaagctaaatcaggcaaacagaatccaaagaagttacattgtcaggaacttaaaaaggtgattgaagcctcagacattgtgttagaagttttggatgccagagatcctcttggttgcaggtgtcctcaagtagaagaagctgttatccaaagtggatgtaaaaaactagtacttgtattaaataagtcagatctagtaccaaaagagaatctagagaactggctaacttacttgaataaggaattgccaacagtggtgttcaaagcctcaacaaacttaaagaacagaaagaagacattcaagataaagaagaaagttgttccattccaaagtaaactctgctgtggcaaggaagcactgtggaagctccttggaggttttcagcagtcctgtggaaaaggagttcaggttggagtggttggtttcccaaatgtgggaaaaagcagcatcattaatagtttaaaacaagaaaggatttgcagtgttggagtttccatgggacttacaaggagtatgcagattgtccctttagacaaacagatcacaatcatagatagtccgtgcttcattatctcaccttgtaactcccctgctgcacttgccctccgaagtccagcaagtattgaagttctaagaccattggaggctgccagtgccatcctgtctcaggctgatagtcaacaggtggtgttaaaatatactgtcccggggtataaggattctctggatttttttactaaacttgctcagagaagaggtctgcaccaaaaaggtggaagcccaaatgtcgaaagtgctgctaagctgctatggtctgagtggacaggtgcctcattaggttactactgccatccccctgcatcctggaatcattctcctcattttaatgagaatattacagcaatcatgaagaggggctttaatctagaagaactagaaaagaataatgcacacagcatacaagtcctcaagggccctcatttaactaataaaatccttttccggtcttcgggcctgacaaatggaatactagaagaaaaggacatccccgaagagtcaccaaaacagacagaagaccaacaggatggtgatgatcaagaacatgttactggtgaaaaaaatgcagagatctcagatgtgactcctgtagaagagaccagggagatgtcacctgggcaatcaacagcaagtaaaccatctgacagatcctttatcttggataaaatgagtgaagaagacgatgcctatgactttaccacagattatatatagccttctaaatgttcaagtgtgctctgtacagtgtttntagattgctttggtatgatataaagtgtaaatcttgtgaatatgtatcatgttttaaattaaaaacaaaataaaaagtgtttgtataaaaaaaaaaaaaaaaaaa

SEQ ID NO: 117 - DNA, 1810 bp, Homo sapiens; identical to SEQ ID NO: 116
  misc_feature (1705)..(1705): n is a, c, g, or t

SEQ ID NO: 118 - DNA, 3239 bp, Homo sapiens
cgggccgcccggtctccggcgatcgcgcggatggcggcgctggcggcgctggccaagaaggtgtggagcgcgcggcgcctgctggtgctgctgctggtgccgctggctctgctgcccattctcttcgccctgccgcccaaggaaggccgttgcctgtatgtcatcttgctcatggcggtgtattggtgcacagaggccctgcccctgtcagtgacggctcttctgcccatcatcctcttccccttcatgggtattctaccctccagcaaggtctgtccccagtacttcctcgacaccaacttcctcttcctcagcggcctgatcatggccagtgccattgaggaacggaacttgcaccggagaatcgccctcaaggtcctcatgctggttggggtccagcctgcaaggctcatcctggggatgatggtgaccacgtcattcctgtctatgtggctgagcaacacggcttccaccgcaatgatgctgcccatcgccagtgccatcctcaagagcctctttggccagcgcgacactcggaaggaccttccccgggaaggcgaggacagcacagctgctgtgcggggaaatggacttcgaacagtgcccacggagatgcagtttctcgccagttcagaaggaggccacgctgaggatgtggaggccccactggagttgcctgatgactccaaggaggaggaacatcgcaggaacatctggaagggcttcctcatttccattccctactcagccagcatcgggggcaccgccaccctcacaggcacagcccccaacctcatcctgctcggccagctcaagagtttctttccacagtgtgatgtggtaaattttggctcctggttcatcttcgccttccctctcatgctgctgttcctactggtgggctggctctggatctctttcctctacggtggaatgagctggaggggctggagaaagaagaactcgaagttacaagacgttgcagaggataaggctaaagctgtgattcaggaggagttccagaacctagggcccatcaagtttgctgaacaggctgtcttcatcttgttctgcttgtttgccatcctcctcttctcccgggacccgaagtttatccctggctgggccagcctcttcgcccctgggtttgtttcagatgctgtcaccggtgtggccattgtcaccatcctgttcttcttcccttcccagaagccctcactcaagtggtggtttgacttcaaagctcccaactcggagacagagcccctgctgagctggaagaaagcccaggagacagtgccctggaatatcatccttctcctgggaggtggctttgccatggccaaaggctgtgaggagtcggggctgtctgcgtggatcggtgggcagctgcaccccctagagcatgttcccccactgctggctgtgctactcatcactgtggtcatcgccttcttcacagagttcgccagcaacacggccaccatcatcatcttcctgcctgtcctggcagagctggccatccgactgcacgtgcaccccttgtacctgatgatcccgggcacggtcagctgttcctacgccttcatgctgccggtctcgacgccccccaactctattgccttctccactggacacttgctggtcaaagacatggtgcggaccggccttctgatgaacctgatgggtgtcctgctgctcagcctggccatgaacacctgggcacaggccatcttccagctgggcaccttcccagactgggccaacacccacgctgccaatgtgaccgcactgccacccgccttgaccaacaacacagttcaaaccctctgaacactgatggggacttctttttccggctgggcgttcctcccagcgggttgttgctgttgttgctgctgggatcctacaagctgatcgagtaattcttccctgtaatctgctaggaggctgccagccaggttccctgggccacaggctcactgtctgcagcgccttctctttctttctcatgcatttcaaagctaactcctgcacctgatgcctgaggaacaggcttttctcaccgagctggtctgtggccacggtgtggggaaagtccacttgagccacaagctgaaatggcgaggctgaagtggtgtttgttttgcaacacctagggtcgagggtatcgagacaggaggagctatgtgactgcaaagctccagatgttacagatgttcacagctggctggattctgccttttctgtttaaccatctcccttgcagatgatacctggcagctagaggtcggcttccattgcctgaggcggagggagtacacaggtcttcctggagtctctctgctgcttccccaatctcgcaagcagcacaccatggggtttgaaaaactccaactcacacatctatccaagatgcctgggattctctttttttcatctgattctcttaggaccaagctctaggtcagccttgctcattatccttctagggccctcctgtctgtggcccgtggggaagggctctgtggctgcagaccaccagctgtttttactctaacaactgggtttggcctccccgcccccccccccccgccccacatgatcagtaagttctatttgcaaaggccacagtcttcaggggtgagagaaaaatctgaaagacgtggagacctgtgagaaaaccagggcaaagtatctcaggccagaagtgtgctgtaacattgtgacattgtaacatcctgcagatggagaccccacccccacccccagtccccttccaccagaggccgaagcctgaaagcagacagttgctgtccttattcccagtaaaagcctctgatactctgcgaacagcacactgtggggacagtgggcagctcggaactcggctgacaccagaggtggaaccatcacttcctccagagggtggacatccgaaggatggacactttctgttaaggcacaagtgagtcagagtattttcccagagctgggctggagggggcctgagctggaagtgacactgtaagactgagtcagcaccccctgggtctggatagtgggatccctcaggggacaaggacgggcatacacagagaagaccatggccttgtgaccacaggattcatgatttctgatactgctgatccaatatgcgctcaaataaataaagactgttagtcaatactggaaaaaaaaaaaaaaaaaaaaaaaaaaaaaaaaaaaaaaaaaaaaaa

SEQ ID NO: 119 - DNA, 487 bp, Homo sapiens
aaggtttgtttttaaccgttgtggatgtgtacgtgtggaggtgtccccggaggctagaagagggtgcttgctcccctcgagcctggcatgggtggactctggtcctctgctcttcactgctcagccatctctgcagctccggagaagaaggctctgacaggacagggcccaaaaccctgcttgtccttcagtggccctaggaatgcttaggcagactgaggtaggggcacagaaggggaacctgaattctcatagctcaagacctggttaaaacttctgcgggggtagtctgaggtaaaagagaaggcaggaaaacagttctgtcaaggaaaggaaggcttgaagaaaacagacacaatggagccaggacggagaggtggagcctatgaagtcaggagagtccagaggaccacttctctaccaggagcagaccttagtgatgacagagaacagagctggtcgttagacacagcctacagccagctct

SEQ ID NO: 120 - DNA, 459 bp, Homo sapiens
cggagctggggaccgaacccagggccttgcgcttcctaggtaagcgctctaccactgagctaaatccccagccccagtgcctgcccctcttaaggcctgttctcacaacatccttaccaaccactttgccagtagaacagccgctgtagatgaactgctggcccgtgctgtgggctggggagaatcggcatcggatcagagtgtgaagcactccatggcctctgtaggtcatcaaggagctgtcacctgggagcttcaacttcttccaggctttcttgggcacctgctgccagcgatagtcccagttctgctgtgtggcagccagtcgtgacgcttccatgccttctcggctggaaaagcgtctgatatcccagagcttaatggtctgatctttggagttggagatgagataccgggcatcacccttgctgtcaatgaaggtgatgccatcctggtggc

SEQ ID NO: 121 - DNA, 606 bp, Homo sapiens
aatgaccagcaaacaatttattggttaaattatcaatcgtggagttccttgataacattatataacaaatggattaattcaccagaaactggcttgaagatactgattttaattactttaacaaaatttggtttgtgtagcaagctcctactgtcactgctagacagtgaatgcagcggctatccaaagccagtcattccttgaccacgggggtctctcagagcacaggtgaataccagttacggttgtgtttgctgacctagcacctagttccagccttaggactcagaagcagctggacagaagatatggggggaggggagatgctggaaacgaacagctaactcgacttcgggccggtgttagatctgaggcaactcgcaggctctgagaccaaagaggaacacagctttggatgtggctgtgaagaaggcaggccccgggaccgaattggtgggtccagaatacagtgccaggtgggcatcaggaactacggggcttcttcttggcttccaggtcctttttaatctcctcaagttttttagccaggtttggcatgtcgtaattctggggccaaatacattccaaccacgttgcccaaagtaa

SEQ ID NO: 122 - DNA, 500 bp, Homo sapiens
gcaaactaaacaaaaagtaaattttattagctatctctggggacgctttgcaattcttccctgggaaggaagttttctgcctcatttgctggtttgtacgcagattcttgctgtggccaagctgtttttgtatggatctaggccctgcttccttccctcagccagacgctagtaggacgctttggacggtcggtcggatggagactaggagagcatgacagaacgacctcggcctcatgcctcccgtgaagctactctcttttgccaggaaccttgatttctccaaccacagtatgtgtaggtggagggagccttgaccagcctttcttgagcagacgcagagaagctcttcctgctaacagagcttgtccactagacagtgcagtgcctgctggggtgttgctgagcgtcccagacctgtagcatgaggccattatggctctctgtgcgctgtgccccatcacatctccagtcgccaggcacgttgcggtcttacttgc

SEQ ID NO: 123 - DNA, 409 bp, Homo sapiens
ccgtgtcagaaactgtttaatgttagaattacaggcttttggcaagtatatggcaagcccatctgtccgttcccatgtccactgagaacacagcagagggggcatgccccaagctctggcctcagtccagacttcagcttgggtttgtccagcgagatgtctccagtccatgaaagcccatctggctacagcttgagttcactgggcattggctcccctcttaggccagctgagcaataggcacaaactctgcctgaaactctgctgcttcctgaggcctgggctggcgccccgtgtagagaaatctctggacaccaaatggtttcagtcgtcgagcaatggcctgggcgagcgcagccctgccctgggccggcaaagggccagtgacgaacaccttcatcctcgtgcc

SEQ ID NO: 124 - DNA, 409 bp, Homo sapiens; identical to SEQ ID NO: 123

SEQ ID NO: 125 - DNA, 626 bp, Homo sapiens
actcataggtaggaatcccctttattccttatcaaaacagtttaacagcaaatgtagataatatatgttttatttagacatataagttatcttccatgggggcattctatcttgccccttctaatgaaagagggcaaatttttatattaatcttattcaaagactagaccaacttaacagtaacagacaaagagagcagagcatctagggtagggagtagaaaaattctactcataagcacatttaaacttcttaccagtacagagacacctgctgccacatcagcattactcctgactagtaagtctcccagtacacgtcaggggaagtcccaacacgtattttaaataaatttcactgacttgacattcaacgtctagattagatattcaaagtcttctttattgcaaatatgatgtctttgacctgaggtatggagttgtcttctagaatctttgcgtaaggcatagggacatcagcaccagtgactcgaacagcaggcgcatcaaggaagttgaatgcagggccttccataattctcgcacaaatctcagctcctactccaaattgtggccagcctccttccacagttacgagatgatttgtcttcatgacactggcttcta

SEQ ID NO: 126 - DNA, 626 bp, Homo sapiens; identical to SEQ ID NO: 125

SEQ ID NO: 127 - DNA, 644 bp, Homo sapiens
caaagagaaaaattttattgatataaaatgcacttataaaatgtccacagaagacatgtcatttttcactgctatataaatttattgggaatgttattcacatctattgtcacctaaaacatactgtaaacaatgggttattccctaagacaaatgcatacgtgattctcagcaatcattggtttgattattagtaggttacaaggtcacatctctgtggaatgtcagtgaccgctgtagtgtgacaggcttcagcgcatcattgcacacactgcttcagaacagtccccaccgggtctggacccaggacgcaaagcaccccctctgcttgaaacggcagctctggaaggtctgcgtcacagctccaggtctctcgctgcagcactctatgggcacgtgtgatgacgtgtacacacgcacgactaaaaagtttacctctcgtaaacaagagcaacattaccgtcaactctcctgcatatttaagtagtaaagtctacgtatttgtaaacaaacaaaacacacaaatctatttttaaaaacttccatcagctcgtaattcctctgtgatctaagtgagtccacactgaatttctgaaaggcgcatgtattaccttaggtaataaagctctgcaaggggtgcttca

SEQ ID NO: 128 - DNA, 515 bp, Homo sapiens
caacattaaaatagatttattaattactggtgaaaaacatgatatattataaccaagtcatatactttattgaaaagaaaaaaatattcggtaagaagtttggcacggtcttctgctgggacctgtgtgaaatcccaggacttgtaggtcggggctgccttcgtgaggggtgtcaatgcagcccaagaagtgggtaaagtaggaagtgggggtcaaagaaaggcaatcaagaggtctgctcacaggggccttttcccacgttcatgcactgtcaggctgtatcctgggacagcggggagcctcggagagttaatgagaaacagaattgtcactttggcgaccaatgtcagaaaacaggttcctggtcaagcgttaggtactagcgaattctgaccctgagacttgaggtgtcactgtctttaaactgccaggcatggagggaagtgtccaaagatgggacttatagagagaagtggtcccggcttcctgtagtctccatctcaccagccccaggc

SEQ ID NO: 129 - DNA, 533 bp, Homo sapiens
  misc_feature (440)..(440): n is a, c, g, or t
gacaataagaactctggctctttattgagtgctgctctcattctgacgtttgtctgctctctgttcctctgtagttcaggatagagtgtatggtggggagggaggctgaggtggccaagcaagggatacatgccaagggggcaccagggagaacgttacaatgctgtgagacacggggcatggctggaaggacacacaagggcgagagagagagagagagagagagagagagagagagagagaatgaatgaatgaataaatgaatgaataggggtcctaaaagggttgggttgggtaagtccagggccttgcagtctagttttctgcctcaagagagcaggaagaaagcctcactgtggagaaaggctgaagctgattaatgatcaccccggccgtggcagcggtgctgagagtctctgctttacctgacccctccttanaagtactggggtgggttctggctgcacatggggagatcagatggccttcttgggggagagttatttcacagttttccccatgatgtggggccc

SEQ ID NO: 130 - DNA, 533 bp, Homo sapiens; identical to SEQ ID NO: 129
  misc_feature (440)..(440): n is a, c, g, or t

SEQ ID NO: 131 - DNA, 541 bp, Homo sapiens
caaaattaagaccagtgtataaacatacttgccaagaaataagcaacttggagcttattacattagcacaaacattacatcaacagttcgctaatcacatctgtgggtctaaaggaatcaggccgtaaaagggcatctctaaaacacccctgggcaggtccaaactcgctgggtcacccaattacagtggagaaggcagtcacagaaagaaacccaatgaaatcctcctggccactaaatgggagtcttgaaaaccctctggcatgaagagacttgtagagagtgggagaacacccctttactatggaggaaaaccaggagtccaggtattctcacacatctgacatggcccctgagaacaagtttcagcttgcataatccctgcatcaacacatgcattaccactaaaaggagtcccgttgggtcctacccggatgcccaggggtctcccacaggtaggttcatcatctcgggttttgcaagggcccgaaccaaaccgggcgatggtctctatttctccattctccagttttacaactcg

SEQ ID NO: 132 - DNA, 603 bp, Homo sapiens
gcagatttagaaatttgagatttttaataaccacaaaagaaatcctttcacacctaatgattattaacagaatgtagtggtgtattatctaaacagaaatcgtgctgatgtgccataataaactattagtaaaaaaatacactttagggcacagcattgtatcacaaattttacagaagggatactttgcaagaatttaatcaaactagagtaactgtatcttttaaatgcagcacttaaaaatgtaacaactctgtgcattctttttcttaaaaaaatgaccttatatgtgtagaaatgctgctttattgctgcagaggtcaaagttcaaggctcaagaggtacaggagagaatacaaaggtagccttagaaactcggttctgtttatgtataaaaaggtaaagtttataaaagttaatttacaaaccaagaacaaaagtggtatgcacgcattatgtacatgcgtcctgaacacatcaaacatctcagatgcatagcccaaagaacagaagaccaccaaccactctcccttgtcaaaaaaaaatattttaagtcacaccattaatttcttccaggtgatttacacatttccgaaaccatca

SEQ ID NO: 133 - DNA, 544 bp, Homo sapiens
actattaaacttcaaaggaatttattatcaaaattaaaaatgaagccttggttctagataaaggcataatcccattcaacagttgtcaaggagcgtgtgtcggcagagtctgcacacagcactgaagggcaggaggaagcaataggtgggctccagttggaatgttgaatatattcagacagcggcctcttgagttagacagtcatgacacactggatgaaatcatcgtacgagaaattcacaactccttgttgaccagaatcccgtctgcggaagctatctgtgagagccctcagtttgacacagcaggctatgtagtcatcaaaggtgatcttcccgctggtgctgtaccgctttgctactgaattcacggtttgggggctcaacctgaaccccatagtggttagggccttctgcagctcctggggatccactgtcccactcctatcactgtcgaagctgatgaagtgttgtctccagccactcagcacagtccagagctctctgaactcactgaatcccatcgtgccagacatatctctat

SEQ ID NO: 134 - DNA, 472 bp, Homo sapiens
caaagttgtgaacaacgtcaagaacacatttggctacttaattactattttaaggatggcgtgcagattcatagagtcagcattgtggttttcggggggagtataaagattctgcctctactttcctttacagtaaaactgtgacaaattaatgaaacaattatacccgctctaattgtatacggtggttcctggcctcttttgttctacaccccaccggctattgtatacatagtgagttttaagcttataaaaaatgtagtagaaattgctgttgtctaaataggtaaaactattcctttagtagcttgaaatattactacgtggttgaatacaaacctttctttagtactactttagtaacacttaaacatacacaaagtttaaggaacaagcttgtaaccagtaagtctatgtaaaattctgcattgcagactaaatacagcggatggcgtatagacatcagagaaaa

SEQ ID NO: 135 - DNA, 482 bp, Homo sapiens
aaggaaacaaatatttccctttatttgagtgtgttacatctactcatgggatagtcataaaaactgaaatctttaatttacaggactataaatgatgccacttaactgagaaccagccagcaaacagtagcatctgaagaccaccactcctggagggttccccacaccaagtcagcctagtagtgactacagtagattaggagctaggagtcagaagaacaatgcttgaggttataccaacgggggtttccttactcctttgccagctgcacattggtaggctttgctccaatggggatcccatatttgtgcaaagtgttcatcaaaatctccctcatgtcgttgttgtaggaatcaaagtcaaatacattccgaaccacactggagaggccttcagtagggaatttctctaagtgtttgacaatgttgacaacttctctggtagaataaggatagttgataatcccttggtcagccaattt

SEQ ID NO: 136 - DNA, 367 bp, Homo sapiens
acagtgacaagaaggcttacaaaggagaaggaagaagaacacattggacacctgagattgacaagggtcatttttggtccaagtgctgttaacatttttgagggagttttaaggcatttgggtctcagggtttgttagcttgccctattgccttcttagccagcagttctgagcaactctcaagctttgttaccatctgaggtgcatcttctttctgtgtacttctatttctaactcattgttatgctgttactctctggtctcccatgtagagtactcaggaggattttcttgatctttccgctccattgagaacatctttaattgtatgaaacatcgcaggttgtctttatctacagagtaaagg

SEQ ID NO: 137 - DNA, 424 bp, Homo sapiens
aacttctgacaactgtttccacatgctgcgtcatcctttggcccacagacccacgtgctaaaagtgtcctccaagaagacatttcctatataaacatgggtgtgatgtgtgccacacatcctcaagatgacagaaccctttgcagataaaattaaaattgaatctgagtgagaaatgaccggatttcccactttggcaaagatcaggcagcagcctcccggcagccatccctgtgtagaagacagggtgagctgtgacctctgggaacaaggcatgagacctcgtctggggaccatcaggccagggaggcaggtgggcagtggcaggctgagggcagaggagaagggcagggcagcatgggggaggggtgttgtctgtacgtgcacacgggaggccatgggtggagacgaaatcaacttcctat

SEQ ID NO: 138 - DNA, 479 bp, Homo sapiens
  misc_feature (435)..(435): n is a, c, g, or t
aagacaggatgtcagtccctgaaaataacatttactggttattgcctttaaaactgtggattttttttaagttacagaaaatccagttctgcaccacaatacaactgtaaaaaatctgcatcaccttaaaactgtgcagtaatgccattttataactgcataaattttattagcgttctaaacagttttgcgattttttttttgtattatatgcttgcaggttatatcttagtgcaattcagtcccaaatactttaattttggaaaaaaaacatacagtttgaatgtaaaatacccctacagatataagcaggggcgtttcccccttttaatactttggttttcaatacagtccacggtatagcaagaactacacatacccaacttatatttaagttgcaagcacatgcttcagaagctacttttaaaacagtcnccttgcaaactctaccccccttaacatcacaacagtaaacgatt

SEQ ID NO: 139 - DNA, 1428 bp, Homo sapiens
ctgtttctgctacttgctctttgtttcaaactgccttggagagtttctcacagtaccgtgtgcttcttgctaacttccggtttaagctttagtcgttctctagtctcttcagttttcaccctgagcctcgacactggactactgaaatcgtgtagtgaacgttggatgtgtcccaaaaaggtaatgtggaacacagccgtgcactcggaattcatacatgatcacgtggattacggctttcaaaactgcaagagtaaattcaattggcatgtcatcaaggagaagcgggatgcttacgtgagccgcctgaacaacatctaccaaaacaatttaaccaagtcccacatcgaagtcatccacggctacgcaacatttcgagatggtccccagcccacagcggaagtcaacgggaagaagttcactgctccgcacatcctgatcgccacgggtggtgtgcccacggttcctcatgagaaccagatcccaggtgccagcctggggataaccagtgatgggttctttcagctggaagacttgcccagccgcagcgttattgtgggtgccggttacattgccgtggagattgcgggcatcctctccgccctgggctccaagacgtctcttatgatcaggcatgataaggtgcttagaagctttgattcactcatcagttccaactgcaccgaggagctggagaacgctggcggtgttgaggttctcacagttaagaagttctcacaggttaaggaagtaaagaagacctcatcgggcttggaactccatgtggttactgcacttcccggtaggaaacccaccgtgaccacgattccagatgtcgattgcctgctctgggccattggacgggacccaaactctaagggcctgaatctaaataaactggggatacagactgatgacaaaggccatatcctagtggacgagttccagaataccaatgtcaaaggcgtctatgccgtgggcgatgtctgtgggaaagcacttctcaccccagttgcgatcgctgctggccggaaactcgcccatagactttttgagggcaaagaagattccaggttggactatgacaacatccctaccgtggtcttcagccacccgcctatcgggacagtggggctcactgaagatgaagccgtccataagtatggcaaagacaatgtgaaaatctactcgaccgccttcaccccgatgtatcacgctgtgaccacgaggaagacgaaatgcgtgatgaagatggtttgtgccaacaaagaggagaaggtggttggcatccatatgcaggggattggctgcgatgagatgcttcagggcttcgctgtagcagtgaaaatgggggccaccaaggccgacttcgacaatagggtcgccattcatcctacctcttcagaggagctggtcacacttcgttga

SEQ ID NO: 140 - DNA, 626 bp, Homo sapiens
caaagtagaaatttaattcaattaaagatcaaacaaagcaggtgtttgtattggtctaaatatttgatccactctaatgaatattattcttctcaccgctaggcatttatttttagatatccacaaacttcattgttaatttccctgtgaataaaaagataacagagaaccaatgtttagctcccgccctcaacccaaagtggctcactgtatgggtcagagggtgcgtctcctctttgtcaggggtcacgagcatcaaggcagaagacatggcttgtggtatacgttggtctgctgccccgtggtctcccaaatgaaggacaattttcgcagagtcatcgagaaggtaaatgcattgggtttctgaagaaacacaaaactttcttcaggttaaacactccattgttttgatgactcttctgaatctgtttccaccaggaagctgtctagataacatccagtacgtttactacttaactcttctaccagtatattaacatgaggctatgtgattcaaagtaatatctaagggattctggaaaatgttaggtttcaaaccagtcaactacagaactacttactaaatactatgttacaataagatttattgacctaaacattattac

SEQ ID NO: 141 - DNA, 645 bp, Homo sapiens
gagacagaatataaaatgtttttatttcaaaatgcaaaatgatattcgttgtaataataataataataataacaacaacaataaaaataacagtataaaaagcatgtctccttccctaatgcaaagtgacagctccttgatcgctcccacagccttggacaaatcacagtgcatgctgcacagcagcaagtcagtcccagatcccttgggtgatctgtgcagggtcagttctggattcggtggcaccttgaaacagcatgtgactctctctcgcccacctcagtcatgatctctctgtgtctcgcttctctgccagtcaccagccttaagaggcatgctgccggagggacagggcccggctgcacaaagtcgcctcctgtgtcttgccttctgctatcagggcctgcttgtggagggactgctgctcacaagcatcccgcagctctgccactgccgcctcctggtcgcgcagacggctggcagctgtgaaagggctgcacacagtctccactagaccgagcaccacaccgaagaacgctagcacactgcccagcacgtacagcttcactagcttccctcgggacttctgcgtcatcatctccttagccagaaggatcagctcctgcacactttccatctgagctc

SEQ ID NO: 142 - DNA, 635 bp, Homo sapiens
ccaaagaaacatttattgaaacacagggcccatgttagaggctcctgagccccagggcgaggcccacaaggcagagaccattgctcagcagacaccccaggttgcagagggaagacaggccatggtagtagaagaatttctgccggagagcactgtacttggggtccttctcccgcagctggcggtaggggtcagggccctggaggctgcctggcacctctgtccccaggcctcgctctttctctatactctgcagggcccacatggtagctgtggtgcgagcctcgagccagcgagcattgatggtagccagtgtgagactcagaagcagtagggtaagctgactgatttcccacagcgtgaggttgatccaggcccgctgtggtgccaagatgcagaggttgatgaaggcacaacccaaggagacgtgaaaatagactgggaagagcttgctctgcacaagtccaaacgtgtgcctcgggaggctccggaaaagcaggaagcctgaggcaaaggtcacccacatctgcatgccccagacaccagacaagaccagcaagtggaccactttaatcagacttcctgggtcctcaccttcttccattctgccgcccgttggagcaccggaggtcagc

SEQ ID NO: 143 - DNA, 3657 bp, Homo sapiens
ccaacacagaactatggaagtccacgaattgttccggtattttcgaatgccagagctgattgacattcggcagtacgtgcgtacccttccaaccaacacactcatgggcttcggggcttttgcagcgctcaccaccttctggtatgccacccggccgaaggccctgaagccaccatgtgatctgtccatgcagtctgtggaagtaacgggtactactgagggtgtccgaagatcagcagtccttgaggacgacaagctcttgctgtactactacgacgatgtcagaacgatgtacgatggcttccagagggggattcaggtgtcaaatgatggcccttgtttaggttctagaaagccaaaccagccatatgagtggatttcttacaaacaggttgcagaaatggctgagtgcataggctcggcgctgatccagaagggtttcaaaccttgctcagagcagttcatcggcatcttttctcagaacagacctgagtgggtgaccatcgagcaggggtgcttcacttactccatggtggttgttccgctctatgacacgcttggaaccgacgccatcacctacatagtgaacaaagctgaactctctgtgatttttgctgacaagccagaaaaagccaaactcttattagaaggtgtagaaaataagttaacaccatgccttaaaatcatagtcatcatggactcctacgacaatgatctggtggaacgcggccagaagtgtggggtggaaatcatcggcctaaaagctctggaggatcttggaagagtgaacagaacgaaacccaagcctccagaacctgaagatcttgcgataatctgtttcacaagtggaactacaggcaaccccaaaggagcaatggtcacccaccaaaacattatgaacgattgctccggttttataaaagcgacggagagtgcattcatcgcttccccagaggatgttctgatatctttcttgcctctcgcccatatgtttgagaccgttgtagagtgtgtaatgctatgtcatggagctaagataggatttttccaaggagacatcaggctgcttatggatgacctcaaggtgcttcagcctaccatcttccctgtggttccgagactgctaaaccggatgtttgacagaatttttggacaagcaaacacgtcagtgaagcgatggctgttggattttgcctccaaaaggaaagaggcggagcttcgcagtggcatcgtcagaaacaacagcctgtgggataaactcatctttcacaagatacagtcgagcctgggcgggaaagtccggctgatgatcacaggagcagccccagtgtctgccacagtgctgacgtttctgagggcggctctcggctgtcagttctatgaaggctacggacagaccgagtgcaccgctggttgctgcctgagcttgcctggagactggacagcaggccatgttggtgcccccatgccttgcaattatatcaagcttgtagatgtggaagatatgaattaccaggctgccaagggcgagggtgaggtgtgtgtgaaaggggcaaatgtgttcaaaggctacttgaaagacccagcaagaacagctgaagccctagataaagatggttggttacacacgggggacattggaaaatggctgccaaatggcaccttgaagattatcgacaggaaaaagcacatatttaaactagcccaaggagagtacatagctccagaaaagatcgaaaatatctacctgcggagcgaagccgtggcccaggtgtttgtccatggagaaagcttgcaggcctttctcatagccattgtagtacctgatgtggagatcctaccttcctgggcacagaagagaggatttcaagggtcctttgaagaactgtgcaggaacaaggatatcaataaagctatcctggaagacatggtgaaacttgggaagaatgctggtttgaagccatttgaacaggtcaaaggcattgctgtgcacccggaattattttctattgacaatggcctcctgactccaacactgaaggcaaaaaggccagagctgcggaactatttcaggtcacagatagatgaactgtactccaccatcaagatttaacatgaggaagaatccttagaggaaatggcgcacctccacaatcctcctcgtaccaatggcctttgagttggtaactctgcctgcagcgagtgtgggaaaggaaatgccatgctggacttgtgcacagggtcttaccatagggatagcagagggcacggaacactgccttacagtcacctgtgttgtagcccatgatcctggggatacacagtttccaaaacgagccttaaacattgtaaaggggaacccataaaagtgctaagttatttaagacttcaaccaataaggtgggtgttaaaacttctgtctcctgtttttctaaccaaggggttaggacttactctttctgatacgtctgctgctggctgcacaccctgcagccgtctgctgctctgaagagtacagtacactggaagaaagctacccctttaagagcaactgtccaggctgaagaaagtcacagtggaccagagatttctcttcttaaccccttccccttgtccctttccctcaccactcacatgcagtacatttatgtgacccttctggtttgtaagggttccaaagggtccctgttgtgcctgctggtaacctcgtgtttccagtacactaaagaacagatcctcctcagaacaatgcgggtacccagtctcagaaaaggaaaaaaaaaaaaaggtggctcctgcgttgagccagcaacttgcaggctcacacagatgtcctcagactccgctccatctctgctccctgcccctcccattcttcccaggggttatgagaaaccctgccttagactctgcagtgaagatggtgttccgaagaatgacctggatgggccatgctcaactgtgattcctcccccgctgtccactcgctcgctcgtcgtggaaccagcccgtatctgcagcggcctctgtgctccaaatgtggttttctagcaaatgctaatgtggtgatcaacttgctttgttttctttccctcccagttaaactcaggcacagcatgtcttcagaagtatctaggcagttggtatacgtgggtacttattaaagtggacagtaataagtaaatgtccttattataaaactacctgatttatgtgaaatgcatttgataagccaaaaatctggggtgtagaaatctgggggaaaaaaaatcatatcctgggatcaacttcccaaggtatattttttaagttaatttgggaaatgaacagcatttcactttgccgcgagtcttggccacatttgacctatttgagctgtttatacatttgaagccactgttgttggctgtgtgacagtgtgtgtatcttgaagcacaactgggtttgcactaaagaatcatcattgtaataacactatttggtagcctaacttcattttcgtattcttaactgcacaggaagtcgataatttgtcacaacggggttttgaatgtttgctttcagtgttggctatttctatgttttataaaccaaaacagaatttccaaaaacaatgaaggaaaccaaaataaatatttctgcatttggagtgagtgg

SEQ ID NO: 144 - DNA, 3657 bp, Homo sapiens; identical to SEQ ID NO: 143

SEQ ID NO: 145 - DNA, 433 bp, Homo sapiens
ggcctttgagagatttattgaagaacaagtatcagcgggacactgaaacagtcacaccaactgttagagcaaaaaggcactttactgtctttagaatctcactccatttggtaaggcactgcagccctgtcgtgttttcagtgaacacacagttttaaaggcagcaatgagtaactccggcctaagtgagcacaggcactaacagttgaagactcactcgctgtggtcacggtatgtaacttactctcaaaagagctcttactagtattctaaaaacgtggcagtatgaaaaaaatcagtttctcttcagtctgtggtctcttccaaagacacctgtatgtaaaggtattttttcttttacgtatccctgggcaacagtgaaccatgcataaaatatcaaaattccctcttagaaaataaacgtcaaaggacg

SEQ ID NO: 146 - DNA, 1332 bp, Homo sapiens
ggggggctctgtggtaacagttctggaggtgttgcggtcccgattgtcccactggggacccgagccgagtcaccgtcagaatgtcgggcaaagaccggattgaaatcttcccttcgcgaatggcacagaccatcatgaaggctcggttaaaaggagcacagactggtcgaaacctcctgaagaaaaagtctgatgccttaactcttcgatttcgacagatcctgaagaagataatagagactaagatgctgatgggtgaggtgatgagagaagctgccttctcattggctgaggccaaattcacagcaggggacttcagcaccacagttatacaaaatgtaaataaagcccaggtgaagatccgagcaaagaaagacaatgtagcaggtgtcaccttaccagtgtttgaacattaccacgaaggaactgacagctatgaactaaccggtttagccagaggtggggagcagctggcgaaacttaagcggaattatgccaaagcagtggaactactggtggaactggcttccctgcagacttcctttgttactctggatgaagccattaagataaccaacaggcgtgtaaatgctattgagcatgtcatcattccccggattgaacgcacccttgcttatatcatcacagaactggatgagagagagcgagaagaattctataggttaaagaaaatccaggagaagaaaaagattatcaaggagaaaagcgagaaggacttggagcggcggagagcagctggagaggtgatggagcccgccaacctcctggcggaagagaaggacgaggacctgctgttcgagtagctgcccgctgctcccttcaggctgagcatcatttaactcagtgtgcaggttcggtatgtgcgggtatttattttggcagaagagttcatctggctgtaagatttatcagaatgctgtgtgagaccatttttcctgcatcataattcagcaacctgagatttgtaaaacccacccagcacttacagaatctccccagtgaaagagtcataccatcctatttacactagtttgactgatgtgtttaaaactttaggaaatacttactataaacattcatggtctcaggcaaatgctgagcagccttccttcctacccacttgtaaaccttggcactgttgtctgaggctgtgcagccattgtgttactgtggactcaactctatgcctacttttctttgcacgatgtgtctgtgtgtaatggaagtggttctgcccatttaaatatgacttatgaacagagtaaaatgatttaaaaaaccaaaaaaaaaaaaaaaaaaaaaaaaaaaaaa

SEQ ID NO: 147 - DNA, 480 bp, Homo sapiens
gggtccaaaggtgatatttcttcacatggaaaaaaactaaattcaagccacacaagaacatgccttgagggaaacagtgatgaagcctgctcggaccacacaggagcagatgcccattcagagcagaggccgcatgaacaaatctttattcggaacagacagacgtttacagccaataagaacacaaaggccatggacaagactgtaagcgcacctgagctttaaggttctggtgaggtcctcacaaaactaacacactccacataccagccgggtaagaagaactcatgtgtcagggccagcgggggcacgaccataagtgagctgtgaatgaccataatgaggacctttgttcacactagctgcttttctaatctaatcaggttaatttcaatacagcaaataaccgataaaaaataaaaggtgccacctggtcagcaacatcatacactggtgacaagagaacgttactgagttgtg

SEQ ID NO: 148 - DNA, 466 bp, Homo sapiens
gagctcttaaattcattgaaaaccaataatgggagaagtaaaaccctgaaaaggtgcgtatagtgcacgtggacagtagccatttgtattctgaatgcaaagattcctgtcaatatgaaaagttcgggtcgatgttaaacaaactacaaaaggtttgaacaggtcgctcacaaaaggtatttaggttatcagttaccatgtgaaatattttcattgtcgtaacacaccagagaaatagaataaaaatgggggacagtatcactttacacctacgagaatggctaaagtcaaaagaatcgacatgcggcctcctgccccccgcagatgtacaatgtttacacctgacacacacaggtcaccagagtctggcttcttttcatcgaatataaatacctgctttccccaccaccaacaaccaaccagcaaatcagtgcccgtatctacttaaagaaagttaatgggtgct

SEQ ID NO: 149 - DNA, 434 bp, Homo sapiens
aaaacataactgagctaatatttttcaaaggattgtaagaagacaatgacttaaaaagaaaataaattttctgttatactaatacatagtgaacttatcaagctactgtaatactgtaaatagtcatgcttgtcaggatctttctggaaggacatggccaagcatgagagggtggggggcatccatgcagtcattctaggttagttgaggagtaggaaattgagagtacttctcgttttgatgcgaaggcttctcaaatcatgaagatcattacaaggacggccgtaagtgagatgaatgagcctatagaggagactgtatttcatgtggtgtaagcatctggataatcagagtaacgacgaggtatccccgctaatcctaggaagtgttgagggaaaaatgttatgtttacacctacaaatataatggcaaag

SEQ ID NO: 150 - DNA, 656 bp, Homo sapiens
gcaaaaacatcctttaataactgttacctctttctcagtgctcccttctcaagtgactttgtcttgagagtggcaacaagggctactcattgctagttatctaaaagtagattgggttggggagaccctgagaagactggggaaaggcttccatccctcaaagtcagatggcaccaaggcttctcaggacacgttcttaggctggattgaccacttggctcatcatcaggctgctccatgtgaacttgtcaaagagcaggaggatgaagggcttgttgaacttgatgtcaagtggttcagagcgcaggtgtaggggagccccgttggtagaattaggcaacacattcccttcatccagttgtagcatggccttgtggaccatcgttaatgtcaagggaacatctttggtgttgcctgagaaatctgattggttggtgagcaagtccttaatgttcaggtcttccagcacgtctttaaggtcataggtatcagacatggagaatttcgggatgtataggttcacctgccttggggtcataagcttgccccacctatcaattgtgtcccgactaagtgcagcgatgacagtgtccatctggccctggtccggaagaatgaagaaggcagttccatttcccacatagtccatctgtatc

SEQ ID NO: 151 - DNA, 552 bp, Homo sapiens
gatgaggatctgtttctattaaatacaaattgttgtcagctaagcataggaaaaaaatgctactatagacgggcttgcttaaatgttgttaatcggtgacaacagaattattttttttcctgtgtcaatgattttaatgagaagtcctgcttctccagaagcctctgctggctgctctgaaatccttcctgactagtggacagtaagtgacgcagctggggcgagcatcttggcctccaggccgctgctggactccgcgctgttaggcaaggagcaatctggctcttgtctcctcttaggagggacgtacccgctgaggcgagaggccaagctgcgtcttgcgaggtggtctgcctgagctccatcctcttcttgtcaggaccgtgcacgacactgtgcctcatgagactttgtttcactgcaaacgtctggccactgccagcgtgctcacacacagatgggcacttttcctcacggaaggagagtatgtggcgctgcaggttgaacacggctgtgtaggttcttccacagccttcccgcggacaacggtac

SEQ ID NO: 152 - DNA, 346 bp, Homo sapiens
agtaaaaacacaccaaatgacttttcactcggctgtgcgacaggcattgtcttactacagctccatttccagaacccaataccaggggctgagagtttaagtataagaaaccagaaggacagttgaccactctcgtttgctcgatggctactagggccaaacctacattttaaacacaaggaacacttctaaaacgggcgaaagaaagcctcgcgtccgctctaaacttggcttcgcgtcattggcgtccacacgtctctgcacgcaagatgttacttcctcttggttctgtggcccacaatcgcttcaaactgaatattctgtatacggtttatagcttttaagc

SEQ ID NO: 153 - DNA, 485 bp, Homo sapiens
aaagacagacccacaacgcctttcaaaggtgaaaaagaaaatgccctttccctcctgggtcgagggtgaggggaaggatagaggtcaattcattcttctctcagactcgctctcatccactgggtgtcctcggggaggaccgttttctggaagccagtgcagaagggtgccctgttctctctggtgtcccaagctcagctctgtccagtgtccgaggagcctcctcccaggaacaggggctggctgtccctgtgtgggtcggaagaagtcagtcctgctccatctcgatgagcgctgcgctgccgctccatctcaccgtggcagcagcgtgtaccccctgagggcgggctggtcagctggggcatctggttcagtccaggcaggcccatcagaagccaaacatcatgtcggcaatttggacctgcactctggagctggggtccaataactctgcctcactcatccttgcttgtcatcagattttg

SEQ ID NO: 154 - DNA, 499 bp, Homo sapiens
gacactcatggcgggccaagtgaaagaccgggaggccttccagagactcaacttcctttaccaggctgcacactgcgtcctctctcagaaccccgagaaccaggcactggctaggttttactgccacacagagaagaccatcgcgaagcggctggtcctacggcaggacccctctgtgaagaggacgctctgtcgcgactgctcctctctcctcatccctggcctcacctgcacgcagcgccagagacgccgaaagggacaacgctggacagtacagacctgtctgacatgccagcgaagccagcggttcctcaatgaccccaagcatctcctctggggtgaccggcctgaagcccagttggaaaatcaggcggatttcaaaccgtcagagcccctgccaaacatagctgacctttctaaggagaacgtgcagactcaggctttaaacaccactgaatgaactcatccattttccagataaataaagttgagttgtttg

SEQ ID NO: 155 - DNA, 499 bp, Homo sapiens; identical to SEQ ID NO: 154

SEQ ID NO: 156 - DNA, 445 bp, Homo sapiens
acaggaaacaaaacactgacaaatactgtacagcttggatcatttatatattcttctcaaaaaagtgactgctttttctttacattttcctgttctttttcctcctcccaagaaatcaaaaaagtccacagaacaatggataaagacccctctgatggtttctgagtatgaccaaggcagattagaagtccaccgtgggtgggaacaactgggaattgcccttctggatgtttcgtgacaggaactagctcaagtctatttgatcaggaagcagtaggtacactgggcccggagacggaagcttcactatggcaatcagtaaaaactgacttctgtcttaattcaaactggcagccagttgtcacggaaacagtgttattcgtatggtccctgatcctgtatctgacatcccacctctgctgtgtctccacctcttcccccaagt

SEQ ID NO: 157 - DNA, 555 bp, Homo sapiens
aaatcagaacaaatgaagtagcagcaaaagaaccattcggcaatctggcttcactggtcctcaaacaaggagggaatgcagccagagatacatctctcagcctcagcctctcagaatctcacttgggccctaaagtgcatctgcttggtggcattgttcttcatcccggtcttcagcatccatttcgacttcatcctctgtacatactgcatgtcccgttcacgcatgagagctgctcctaaaatcatagaagtctgcaaactccagcgcagcatcaccatctgtaaagagcttacagtggcttttgtcattcatgtgtgcctgcacagcttctgtggaatagaaggacttccctttctcattgcaccacaagcagattttgccaacaccaactttctctcccaaatatttaattaatcctttcaaatctgaaagatactctatatcaggaataaaaaagctgtggactttagtcatatgagccacattcttcacaagggagcttgaatgatgggaacaacataagcagtctgttattgggatggcacctaaggg

SEQ ID NO: 158 - DNA, 556 bp, Homo sapiens
gctgacaatttattgaagcttatctgatcagagcttgcatgaatggacatacaacatcaaggcttttgtaataaaagacaatttgaaataaatatgtgtttaaaaaaacctatgtcaaacactaatgaataatcgacatttacaaattttaagaaaatcatttaggttaataatttttatttcccccacagttaaatagctctctttaagcaggagggagagagacagacagaaatgaagtcatgcccacagcacagtcatgatgttactcttagtgagggactctttaccaagattaagacctagaggagtatctgaggagaatggttaccgagtcgtctggaacctgggagagcattaggagagcgaaaacaagtggcaaagcagagagaatccttagatggaaagtccgttccccttgagaaaaattaatgaatacccacaaacttccatttttagggtttcaatattttcatatcagtttaacctctacccccaaatccaaccaaacaccataaaaactaagttgtcggataggcttagctggctgtactcc

SEQ ID NO: 159 - DNA, 670 bp, Homo sapiens
ctgagaataattttaaaggaaggtgaaactttattatattttttattatagaattagaaaatgtcaaaaataattgtttggaatcacaaaaaattaaaaaggaatataataattgattcatcaaaaggcattctagctgctgttagcatattttctttctttggattatgaacttctatgatttcaactgaatacttttgacagtttccttaagatatgattttgacttattttttcttcagtatttctgtcatttcaggaaccaccttaaataaatctgcaactattccataatctgccacttggaaaattggagcttctgggtctttgttaatagccacaattgtcttgctgtccttcatcccagctaaatgctggatggctccagatattccaacagcaatataaagttctggagctactatttttcctgtctgaccaacttgcatgtcattgggaacaaagccagcatcaacagcagcacgggaagcaccaactgcagcatgcagctgatctgccaagtcatacagcagtttaaagttctctccactcttcaagccccgaccaccagataccaccactttggcaccagttagctctggtcggtcactttttgtcaatttctggtcaagccactctgatattcctgctgatgaaagaacttggtgcc

SEQ ID NO: 160 - DNA, 584 bp, Homo sapiens
tgattttattgagatttacttacaggagtatcaataagggattacttacaggaataagggtgactcaaagtcagttgcatcaccaaaaagtacactgagaaggggtgaccactcaaaaaacttcaaccctgtagctgctcctcacacaactttcaggccgtcataatagttaaaaaatttaagtacttcattatcttatgatttcttttatatacttattcatatgaataaagttagagcagaaaagagagagattataatacatagaaaatgaaatccagagaatgatctgaggattctttgaaaacatacaataaactggaaaatcgtgaagaatttcaagacatatatgaaatatcaaaattaggccaaagttggaggtttcacaagcctccccctccacatatcataggctattgcgattgttcttggttaccacacagaacttgacagtaagaccttattactgaaaacaccacacatcaagtcatagagcaattaggaaatcatagcttatactgccctagaagcttcatccttctggctagctgtcatagtgctagatgatgctgtgcatgctacca

SEQ ID NO: 161 - DNA, 479 bp, Homo sapiens
gaatctagggcatctcagggatccccgggaacaatcttgcctcaggcccctcccccgcaactccctgcatctgcatcccccttgcctgaaagcccttctaagctcggaaactgtgagctaaggagacatagcacaaaatcataaatgagttgcggggagaggctggaaacagtgtgcaagaaatacaggccaggggttggggatttagctcagcggtagagcgcttgcctagcaaacacaaggccctgggttcggtccccagctccaaaaaaaagaaaaaaaagaaaaaagaaaaaaagaaaaacaggccaatgctacatgtgaggctttgtggctgggctgtgacccagcgatatgggcagtggaggggatcttttgtctttggggactctctggagcccaacgatccaggctgtggtgcaggggatagtaaagttaaaatgctacccaccttttggccggttcctttcccctcaacc

SEQ ID NO: 162 - DNA, 427 bp, Homo sapiens
tttttttttttttttttacattttattcacatttattttttgcttttagtgtgctcacagaaaattagaacaccttaagcaggagttgaatagcaatgtttgtaagcaacgttacattccagctctatgtcaaattggtcaaagatcctccagtatttacaaaacacgagagacgaggtgctacgcaaaaccactgcatctgaagatttgtttttcctttattctcaaagacaactggaaaagaaagcattgtctgctgtaatcaaaaaaaaaaaaaaaaaagaaaaaagaaaaaaaaaacataccacagtataaacagtaaccattccacgtatcacagcttggttgggtttaaaatttgtgtttaaaaggtccaagatgactgcagttttacaaaaagatgggcagggtggagacttgcaaactt

SEQ ID NO: 163 - DNA, 1723 bp, Homo sapiens
gaattccatggagaagaccgggagctactgccggagtttcggctcacctgggcgctggccggggcaggagtctcaggagccatgttgtcagaagtcctgctggtgtctgctccagggaaagtcattctccatggagaacatgctgtggtccatggcaaggtagctctggcggtggccttgaacttgagaacatttctcgtgctgcgaccgcagagcaatgggaaagtgagcctcaatttaccaaacgtcggtattaagcaggtctgggatgtggccacacttcagctgctggacacaggctttcttgagcaaggcgatgtcccggcacccaccttggagcaactggagaagctgaagaaggtggcgggcctcccccgagactgtgtaggcaacgaaggcctgtctctgcttgcctttctgtacctgtacctggctatctgccggaaacagaggacactcccaagcctggacatcatggtgtggtcggaactgccccctggggcgggcttgggctccagtgcagcctactcggtgtgtgtggcagccgccctcctgactgcctgtgaggaggtcaccaacccgctcaaggacaggggctccattggcagttggcccgaggaggacctgaagtcaattaacaagtgggcctacgagggggagagagtgatccatgggaacccctctggcgtggacaattccgtcagcacctggggaggagccctgcgctaccagcaagggaagatgtcatccttgaagaggctcccagctctgcagatcctgctcaccaacaccaaggtcccacgaagcaccaaggccctcgtggctggcgtcagaagcaggctaatcaagttccctgagatcatggccccgctcctgacatcaattgacgcaatctccctggagtgtgagcgcgtgctgggagagatggcggccgcaccagtcccagaacagtaccttgtcctagaagagctaatggacatgaaccagcaccatctgaatgcccttggtgtgggccacgcctccctggaccagctctgtcaggtaacagcagcacatggactgcacagcaagctgactggcgcaggcggcggcggctgtggcatcaccctcctgaagccaggtctagagcgagcaaaagtggaggccgccaagcaggccctgaccggctgcgggtttgactgctgggagaccagcattggagcgcctggggtctccatgcactcagccacctccatagaggaccctgtccgacaagccctgggcctctgacatgtcatcctgccaagaagcttccacgtatctggggctggagttggcccctgtgctggccactaacacatttcctgctggtagtgccttgtagactctgagaggcaccacctccatggcccatctgtatcctggcactgctgaagccagacaggcatcagttgccgggtcttctgagacagcaggctgacacagtaggccttccccctgggtgattctgcctgggcctggcctctgtcggcctcacacaaactctccggctcctagccacgcaacccttctgtcctcagatgccggcccctttggaaccgcctagccagtggctcatgtctcctgtcctctctcggggatcatcggctgaggcaaggcatgccgactgctttatccccgtgtgtacctgtggacaagctgcccatggtggggcgagggaagggggaataaaatgagctcgtac

SEQ ID NO: 164 - DNA, 1442 bp, Homo sapiens
gtcccccccaccccagctgaataggctgcgttctcttggaacgcgccgcagaacgaggttctgtgaccctagccgcgttccctccttagttcctttcgcctacccacccgcgtacccgacagacccaccccgtcctgtgccaggaaagcgctgccaccggcaccatgccccacccatacccagcactgaccccggagcagaagaaggagctggctgacatcgctcaccgaattgtagctccgggcaagggcatcctggctgcagacgagtccactggaagcattgccaagcgcctgcagtccattggcaccgagaacaccgaggagaacaggcgcttctaccgccaactgctgctgactgccgatgaccgtgtgaatccctgcattggaggggtgatccttttccacgagacactgtaccagaaggcagatgatggccgtcccttcccccaagttatcaagtccaagggtggtgttgtgggcattaaggtagataagggtgtagtgcccctggctggaaccaatggcgagaccactactcaagggctggacgggctgtctgagcgctgtgcccagtataagaaggatggagccgactttgccaagtggcgctgtgtgctaaagattggggagcatactccctcgtccctcgccatcatggaaaatgccaatgttctggcccgttacgctagcatctgccagcagaatggcattgtacccattgtggagcctgaaattctccctgatggggaccatgacttgaagcgctgccagtatgtaactgagaaggtactggcagctgtctacaaggctctgagtgaccaccatgtctatctggaaggcacactgctgaagcccaacatggtcacccctggccatgcttgcacccagaaattttccaatgaggaaattgccatggcaaccgtcacagcacttcgtcgaacagtgccccctgccgtccctggggtcactttcctgtctggagggcagagtgaggaagaggcatccatcaacctcaatgctatcaacaagtgtcccctgctgaagccatgggccttgactttctcctatggccgagccctgcaggcctctgctctaaaggcttggggtgggaagaaggagaacctgaaggcagcccaggaggagtacatcaagcgagccctggccaacagcctcgcttgtcaaggaaagtacactccaagtggccagtctggagccgcagccagtgaatctctcttcatctctaaccatgcctactaaccagagctgatctaaggctgctccatcgacactccaggcccctgcctacccacttgctattgaagaggggccttcaggctctttcccatcactcttgctgccctcgtgtgtgcagtgttgtctgtgaatgctaaatctgccatcccttccagcccactgccaataaacagctatttaaggggg

SEQ ID NO: 165 - DNA, 2625 bp, Homo sapiens; identical to SEQ ID NO: 3

SEQ ID NO: 166 - DNA, 1932 bp, Homo sapiens
agcagagcagtcggtcccactccagtgcgacccggagcctctgcgggactcgagtccgagcgaacctcgaagcatcatccgcgtccgtctgccgcgttccggcttctgcgccgcgcagagtagcgagcttgtgcatcacccgcgcggccacagctgggggctaagagcagggacaccgagggtgactgaccccgactccgagcgcagccccttcctgtggtccgaacagccatgacccacttcaacaagggcccttcctacgggctctccgccgaggtcaagaacaagatcgcatccaagtatgaccagcaggccgaggaggatctgcgcaactggatagaagaggtgacaggcatgggcattgggaccaacttccagctgggcctgaaggacggtatcatcctctgcgaactcataaacaagctacagccaggctctgtgaagaaagtcaacgagtcctcactaaactggccgcagttggagaacatcggcaactttattaaagccatccaggcttacggtatgaagccccatgacatatttgaggcaaacgacctttttgagaatggcaacatgacccaggttcagactacgctggtggctctagcaggtctggcgaaaacaaaaggattccatacaaccattgacatcggcgttaagtacgcagaaaaacagacacgacgcttcgatgaaggcaagctaaaggctggccaaagtgtaatcggtttacagatggggaccaacaaatgtgccagccaggcgggtatgacagcctatgggactcggaggcatctttatgatcccaaaatgcagactgacaaaccctttgaccagaccaccatcagtctgcagatgggcaccaacaaaggagccagccaggctggcatgtcggcaccgggtaccagaagagacatctatgaccagaagctaacattacagccggtggacaactcgaccatttctctacagatgggcaccaacaaagttgcttcccagaaaggaatgagcgtgtatgggcttgggcggcaagtgtatgaccccaagtactgtgccgcacccacagaacctgtcattcacaacggaagccagggcacgggaacaaatgggtcagaaatcagtgatagcgattaccaggcagaataccccgatgagtatcatggcgagtacccagatgagtaccctcgagagtaccagtatggtgacgaccagggcatcgattactagagtcacacacaggagtgcagtattttagtccattgtttatccagtgagacccaagctagccttgagtaattcttatctcgtcttcctaaacactattacgcttcctgtacctttaaagaatgccttacgtacattcctttctccctttcctgcctcctccctaaattgccttctagtgctgtagcgagggaagcctacagcctaaccagtaactcgcgttggaagaagtgagaaggaacgctgtgcgagggcagccagctctttcgctggagatctataaaattttttacacttacacgtaaactggtattttcaaacaataggaaactatttttttcttttttacagtttagtatgtatctggcttgtacacggtagactaagaagttgatttgctaagtgtggtctttgccaagtaatctaacatgcagctttagaacctgacacgtggatgcttctgcacagtgttgtctgctaagttttaaataaagtcgtgatcagtgtgattcgtgattacatgtgtactcattctttcccgaagctgacaaggtctctcccgagtggcgctctaaaggcgcgtctacagaaatggccgcagacatgtaggtgtgggtggcgtgcctgcagacttcatttgtgccaatgtattactgtagagtcgctgttcccttcaactgtatttattgctgcatttctcagcataaactt

SEQ ID NO: 167 - DNA, 1664 bp, Homo sapiens
aacacaccagggcaccctgaacatcaggagtcggcaaacacagaggctagtagctggctggtatcacctctgcagccaggaggacagagaagatggccttcattgcagctttggggctcttgatggcagggatctgccctgctgtcctctgtgatggcatactgggaagggacactctaccccatgaagaccaaggcaaggggagacaactgcacagtctcacattggcttccatcaacactgacttcacattgagcctctacaagaagctggctttgaggaatccagataaaaatgttgtcttctcccctcttagcatctcagctgccttggccattttgtctctgggagcaaaagacagcaccatggaagagattctagaagtactcaagttcaatctcacagagatcactgaggaagaaatccaccagggctttgggcacctcctacagaggctcagccagccagaggaccaggcagagatcaatacaggtagtgccctgtttattgacaaagagcagccgatactgtcagaattccaggagaagacaagggctctgtaccaggctgaggccttcgtagctgacttcaagcagtgcaatgaggccaaaaagttcatcaatgactatgtgagcaatcagacccaggggaagatcgcagaactgttctcagaactggatgagaggacatccatggtgctggtgaactatctcctctttaaaggcaaatggaaggtaccatttaaccccaatgacacatttgagtctgagttctacttggatgagaagaggtctgtgaaggtgcccatgatgaaaattaaggatctcaccacaccctacatccgggatgaggagctgtcctgctctgtgctggaactgaagtacacaggaaatgccagcgccctgtttatcctccctgaccagggcaagatgcagcaggtggaatccagcttgcaaccagagaccctgaagaagtggaaggactctctgaggcccaggattataagtgagcttcgcatgcccaagttctccatctccacagactacaacctggaggaggtccttccagacctgggaattaggaaaatcttctcccagcaagctgatctgagtaggatcacagggaccaagaacctgcatgtctctcaggtggtccacaaagctgtgctggatgtggatgagacaggcacagaaggagccgctgccacagcagtcacagcagccctaaaaagtttaccgcaaactatacctcttctgaatttcaaccggccattcatgctggttatcactgacaataatggtcagtctgtcttctttatgggcaaagtcactaaccccatgtgatctgaagctccccaaaatctgacaattctgcccaggatcctggaacagagcctggatgctgatctctgtatatgccctgacatacatgctctgattggctattgcaaagttggcttagacagtgacatcaactatctctatggctcccatgtgcactggagcctttggattgtcagtgtgcaggcacttaggacccttgggagcatctacacatgtttctgaacttggaatctttctttattcttcttccctggtgactcctctttctgtgttcataccccaaaccaagccattgataagtcccagtaaaggttctgagaa

SEQ ID NO: 168 - DNA, 595 bp, Homo sapiens
cctgacaggatggcttcccttcgcctgttcctcctctgcctcgctggactgatatttgcgtctgaagctggccctgggggtgctggagaatccaagtgtcctctgatggtcaaagtcctggatgctgtccgaggcagccctgctgtcgatgtggccgtgaaagtgttcaaaaggactgcagacggaagctgggagccgtttgcctctgggaagaccgccgagtctggagagctgcacgggctcaccacagatgagaagttcacggaaggggtgtacagggtagaactggacaccaaatcatactggaaggctcttggcatttccccattccatgaatacgcagaggtggttttcacagccaatgactctggtcatcgccactacaccatcgcagccctgctcagcccgtactcctacagcaccactgctgtcgtcagtaacccccagaactgagggacccagcccacgaggaccaagatcttgccaaagcagtagctcccatttgtactgaaacagtgttcttgctctataaaccgtgttagcaactcgggaagatgccgtgaaacgttcttattaaaccacctttatttcattc

SEQ ID NO: 169 - DNA, 2296 bp, Homo sapiens
caggaaagggcattgaagagaggggcataggggtggtgctctgagaggcagggttcttaggttaatcatctccatagctcagataagaccctgccaactggaagcaaagttattgggagcagaacagtttgtgtgactgcacaggcaggcaggtcggagggtccacagtgtgggaccatgccaggcaccaaacgatatcagcatgtgatcgagacccctgagcctggtgaatgggagttgtcagggtatgaagcggctgtgccaatcacagagaaatccaacccactgacccgaaacctggacaaagcagatgcagagaaaattgtcaaactgctggggcagtgtgatgctgagatattccaggaggaggggcagattgtgcccacctaccagcgactatacagcgaatcagttctgaccaccatgttgcaagtggctggaaaagtccaggaagttctgaaggagccagatgggggtctggtagtgctgagtggagggggaacctctggtcgtatggcatttctcatgtctgtgtctttcaaccagctgatgaaaggcctgggacaaaagcctctttacacctacctcattgcaggaggtgacaggtctgttgtggcctctcgtgaacagacagaagatagcgccctacacgggatcgaggagctgaagaaggtggctgctgggaagaagagagtggtcgtcataggcatctctgtgggactctctgcgccctttgtggcaggtcagatggactactgcatggataacacagccgtcttcttgccggttctggttggcttcaatccagtgagcatggccagaaatgaccccattgaagactggagatcaacattccggcaagtggcagagcggatgcaaaagatgcaggagaaacaggaagcttttgtgctcaatcctgccatcgggcccgaggggctcagcggctcttcccgaatgaaaggtggaggtgccaccaagattctactggaaaccctgctactagcagcccataagactgtggaccagggtgttgtgtcctctcaaagatgccttctggaaatcctgaggacatttgagcgggctcatcaggtgacctacagtcaaagttccaaaattgccacgctgatgaaacaagtcggcatcagcctggagaagaaaggccgagtgcacttggttggctggcagactctcggcatcattgccattatggacggagtagagtgcatccacacttttggtgctgatttccaagatatccgtggctttcttattggtgaccacagtgacatgtttaaccagaaggatgaactcaccaaccagggtccccagttcaccttctcccaggatgacttcctgacttccatcctgccatccctcacggagactgacaccgtggtcttcatttttaccctggatgataacctcacagaagtacaggccctggcagaaagagtgagagagaagtgccagaacatccaggccctggtgcacagcactgtggggcagtccttgccggcccctctaaagaaactctttccctcactcatcagtatcacgtggccacttcttttcttcgattatgaagggacctatgttcagaagttccagcgtgagttaagcaccaagtgggtgttgaatacagtgagtactggggcccatgtactgctggggaagatcctacagaaccacatgctggacctccgcatcgccaactccaagctcttctggagggcgctggccatgttgcagaggttctctggacagtccaaggctcgctgcattgagagcctccttcaagcaatccactttcctcaaccactgtcggatgatgtccgcgccgctcccatctcctgccacgtccaggttgcccacgagaaggaaaaggtgatccccacagccttgctgagcctcctactccggtgctccatctctgaggctaaggcacgcctgtctgcagcttcttcagtctgtgaggttgttaggagcgccctctctgggccgggtcagaagcgcagcacgcaagcccttgaagaccctcccgcctgtgggaccctgaattgatatttctagaaccatggaggggcagagtctccgtccacttccaaggggacatgtgccagcagtacacgctgtgggaagaactcagtttcgggtgggtggggcctaactgcccagaattggggaagagccctgttctcaaccggattatttccatttttactggtgtcttctgaactcagaaataaaactaaatgtcttgttttggaacataaaaaaaaaaaaaaaaaaaaaaaaa

SEQ ID NO: 170 - DNA, 582 bp, Homo sapiens
gccaggcaatttgatctctttatttatttatttatttatttttttggttctttttttcggagctggggaccgaacccagggccttgcgcttcctaggtaagcgctctaccactgagctaaatccccagccaatttgatctctttagagaggaatgaagcacagctcataaaatggtggcagagaggcaaatccattgaaaactggagttgtatcgatatcctttgggtgaagtacagatttcagcttaaagttttgtaaaatcgtggtcaggaataaaaataactccatacgggctaggccctctcctgcacacatccgttttcctgctgagaaaggcatgaaatagtcacttttcttaaactttccattcccatctaaaaagtggccagggtcaaatatctctgggtcggggaattccttgctgtcatgcagcactgatgagagtgatgttattattgttgttcccttgggtattaggtagttcctgaacttaatgtcacaggtcaccgcatgtggcaggttggtaggaatgaggtcaatgaacctctggacctcatgaatcatggcatctgtgtaaggca

SEQ ID NO: 171 - DNA, 769 bp, Homo sapiens
tcaggcctgggagcgtctcttttcctctggcaccccatcgacgatcctagttgtcatcatgggccgccgccccgcccggtgttatcgctattgtaagaacaagccatacccaaagtctcgtttctgtcgtggtgtccctgatgctaagatccgcatctttgacttgggacggaagaaagcaaaagtggatgaatttccactttgtggccacatggtgtcagatgaatatgaacaactctcttctgaagctctggaggctgctcgtatttgtgccaacaaatacatggtaaagagttgtggcaaggatggctttcatatccgggtgaggctccaccctttccatgtcatccgtatcaacaagatgttgtcctgtgctggggctgacaggctccagacaggtatgcgtggtgcctttgggaaaccccaggggacagtagccagggttcacattggccaagtcatcatgtctatccgaaccaagctgcagaataaggaacatgtgattgaggctctgcgcagggccaagttcaagttccctggccggcagaagatccacatctcaaagaaatggggttttaccaagttcaatgcagatgaatttgaagacatggttgctgagaagcggctcattcctgatggctgtggtgtcaaatatatccccaatcgtggtcctcttgacaagtggagagccctgcattcctgaaggcttccacagtgcgctcctatgcgctatcaaatgaggttcaataataaagtctcgcgttcaaaa

SEQ ID NO: 172 - DNA, 447 bp, Homo sapiens
ttgtattcataaagtgctctaaacaagatgttctttttagcagttggggaaaaaggttctctaaaaggcatttaattcttagtggaaaaataatattaacaaaagccttgtgcgaatgtttgaatgacaatttgctcattttcttcatgaattggggtttgatagaaaatgcatatgtgtcactgaaagacagagtgatgggtctgtgtggttggaactcaaaatgacattgctctgtcagtgtgtgctgtgccggcttgatggctttgatgggggaggggtacacttggctggtggtacttccaaaggtgaatcttgctatgtagggttagtggtcagggcagccattcaggctgacagaaccttggacttctgtggcttctgtgatggggacagggacatggttgacttgaatattcttcagacagccaaaaaatgagttccaca

SEQ ID NO: 173 - DNA, 3324 bp, Homo sapiens
gaattccagtgcggctcgctcgccctgccggtgccatggcggccttcagcaagtacttgacggcgcggaactcctcgctggcgggggccgcgttcctgctgttctgcctgctccacaagcggcgtcgcgccctcggcctgcacggtaagaaaagtggaaaaccgccattacagaataatgagaaagaaggaaagaaagagcgagctgtggtggacaaagtgtttttatcaaggctctcacagatcctaaaaattatggtccctagaacattttgtaaagagacagggtacttgatacttattgctgttatgctggtatctcgaacatactgtgatgtttggatgattcaaaatggcacactgattgaaagtggcatcattggtcgtagcagtaaagatttcaagagatacttattcaacttcatcgctgccatgcctcttatctctctggttaataacttcttgaagtatgggttaaatgagctcaaactgtgcttccgtgtgcggctcactagatacctctatgaggagtatctccaagccttcacctactataaaatgggcaacctggataacagaatagcaaacccagaccagctgcttacacaagatgtagaaaagttttgtaacagtgtagttgatctttattcgaatcttagtaagccatttttagacatagttttgtatattttcaagttaacaagtgcaattggagctcagggcccggcaagcatgatggcctacttgcttgtttctgggctattcctaactcgactcagaagacccatcggtaaaatgacgattatggagcagaagtatgaaggagaatatagattcgttaattcacggcttatcactaatagtgaagaaattgccttttacaatgggaataaacgagaaaagcagacaatccactctgtcttccgaaaactggtggaacacctacataatttcattttcttccggttttctatgggtttcattgatagcatcattgccaaatatattgccactgtagttgggtacctggttgtcagtcgcccgttcctagacctggcgcatccgcgacaccttcacagcacccactcagagctgctggaggattactaccaaagtggaagaatgcttttgagaatgtctcaagctttggggcggatagttttggctgggcgtgaaatgactagattggctggttttacggctcggattacggaattaatgcaagtactaaaggatttaaatcatggcaaatatgaacgtacaatggtgtcacaacaggataagggtattgaaggagcacaagctagtcccttgatacctggtgctggagaaatcatcaatgcagacaacattataaagtttgatcatgttcctttagcaacaccaaatggagatatcttgatccaagaccttagttttgaagttcgatctggggccaacgttctcatttgtggtccaaatggctgtggaaagagctccctcttccgtgttcttggtgaattatggcctctctttggaggacatcttactaaacctgagagaggaaagttattttatgttcctcagcgaccctatatgaccctgggaacactgagagaccaagtaatatatccagatggaaaggaggatcagaagaagaaggggatatctgaccaagtgctgaaggggtacttggacaatgtacagttgggccatatccttgagcgggaaggaggctgggacagtgttcaggactggatggatgtactcagcggaggagaaaaacaaagaatggcgatggcaagattgttttatcataaaccccagtttgccattctggatgagtgcacaagtgcagttagtgtggatgtggaagactacatttacagccactgtcggaaggttggcatcaccctcttcactgtctcacacaggaaatccctttggaaacaccacgagtactacctgcacatggatggcagaggcaattatgaattcaaaaagatcacagaagacacagttgagttcggatcatagagaccatctggagaacttcacacttcacaagagaatgaatgaacagaatgcatttgtaaacaacgtgcattgtaaaataaagttaagcttgttttttttaaaaaaacaaagctacaaattgactagatataggataattgaaacatgttaaaacatttaatattgtataggatattgctaattgtgtatatgttggtttaattattaattatgtactaagaatgtccttattcttgtggttaaaaaacctgcctgaattaaattgggcttaaatcagtgtaacctgattcatgggatgtaaaccatttgaagtcagctaatttgacttttatagctctgtctttttctttaatgaagaaccctatttaaaactgggtcattagctgtttattctaacaaagtagtcttgagttcctttttgggtttttttttttttttttttttttttttttttgtgccccatggtagtgggaaccaaaccaatcacaatgttttattggaacatattccatcatcacaggatagcatttattaaacagtggcggatttctctagctgctacatttattctcattcctcatacataccttgaggtgcatttgattccaggagagccatttgggttttctttagctaaataataaatgtacccgtctcagtcttttggactgagtcgttctgaaggctctcgtgtggacagcagtgtgtgcagtctcttacagtccgtgcctgctccacatggtaccagtcttaccagtgcttgagagctcagacacaccctgctgcatgaagttggaggtctcgggagggttttagattttgtgacgggaaccggaaaggctcgtcagagtgtggctgtgtcatggtgagcaccacgtggctgtagaggcccgacatgaggtaatgcactgagcacacaacgccactgctgctgtctgtggctgtgggttcttaaaagtgctggactttgtcatgctcgtgggccaatgacatttcctaggagcggcctctgactcctgtgcagctgcgtctgtgtcagctctggctccctggaaccacgagtgactttgcacaaaggagggctgagagcggacttgatcagtaagtcgtcgtgaatcagtttgcttgagtgggctcggaatgggccttatcacgatggttttgtttcttcgtaactcataatcactggctaccaggataaccctgatgtattgattccgtgaatacatcacattcaatcttaccatgtctccttagcaaacgtgtgtacttattttctgttcagattaaaaaaaaaaaaaaggaattc

SEQ ID NO: 174 - DNA, 559 bp, Homo sapiens
tttttttttttttttttgcaagacaaataaaagtttttatttcacacatgacatcatattgttttcagagtggtgccgaggcctctacaagcatgaaagggaagaaaaacttagaagggccgcttcagtttcttggcaacatgaaagtccaggtattcgtccaggaatctgcttgctacccccatgacagcgaggacagtcagcaaggccaaaatgcccaggctcagccggaaaccaatgatccttttttcagcggcttctgcatagccccagaaatacttgtgacgggcgtatatgtacaggagacccagacaggttgcaaaaacttgattgaaataccatccagccatccacagcgatatgatgaatacggaataaaactccaaagagttttgctgtgcgcgaaatattctctcaaactccagagagcccgtgactgctggaggtgcgatcttgtactttaatcttactcgtccgacttgcaaagcaaaataactttgctgacaggcagagagaacggagactgcaaccagcaggcttgaatcccccgccatctttc

SEQ ID NO: 175 - DNA, 474 bp, Homo sapiens
tttttttttttttttttctcatagagaattttaatctgaaacctttaacagcagagatttgggccttcatttgaagagtcttcaaaagcctcttacagctgtaacagttagggtttctattgccacaaaacaccatgagcaaaaagcaagttgggagggtgggggtgggttatttggcttacacttccatactactgttcattatcaaagaaagtcaggacgggaactcaactgaggttcccttttctctgatgaccctagcgtgtgtcaggttgtcacctaagaccagccagtacacatactttagagaaaaaaggttttattttggggagggtgttaagtcttgctatgtagcctgctttcttaggacccaggatgaccagcctaggggtggaaccagccacagtgggctgggccctctctcattgaccactaagcatccttacagcatttcctcaactgaggttccccctc

SEQ ID NO: 176 - DNA, 361 bp, Homo sapiens
ttttttttttttttcttatcacctttgggaggaacatagttcttcatctccctgtcataacgagctttgtcgctcttggccaaatcctcaaacttcgacttttccttggcagacatggtcttccatctctccgaacatttcttcgagaactcggcgaagttgaccgacgagtcgggatgcttcttcttgtgctcctcccggcaggtctgcacgaagaaggcgtacgaggacatcttgccccgcggcttgttggggtcccccttgcccatgatgacggcgcagcgtctacctggcgcgagctcttccctcagacctccacagagagacttccttccccaagctccgggcctcgtgccgaatt

SEQ ID NO: 177 - DNA, 2977 bp, Homo sapiens
gaattcggcggatggaagccagctgtcccgagaagcagtgaactgtggcgtcatcccgagcagtgccttaccggtattgtgctgcttcacctgcctcgctcggcgttctcctcaggccccgccatggagcgacaggtccaacgacttcgccagacgttccggtccggccgatcgcggccgctgcgtttccgactgcagcagctcgaggccctccggaggatggtgcaagagcgagagaaggacatcttggcagccatcgcagcagacctgagcaaaagtgaactcaatgcatacagtcatgaagtcattaccatccttggggagattgacttcatgctggggaatcttcctgaattggcctctgctcggccagcgaagaagaacctgcttaccatgatggacgaggcctatgttcagccagagcctctgggagtcgtgctgattattggagcttggaactatccttttgttctgaccctgcagccactggtgggagccattgctgcaggaaatgctgccattgttaagccctcggaactcagtgaaaacacggctaagatcttggctgaactcctccctcagtatttagaccaggacctgtacatgattgttaatggcggcgttgaagaaaccacagagcttctgaggcagcggtttgatcacattctctacacaggaaacaccgcagttggaaaaattgtcatggaggctgctgccaagcacctgacccctgtgaccctggagctcgggggcaaaagcccatgctacattgacagagactgtgacctggacgttgcttgcagacggataacctggggaaagtacatgaattgtggtcagacctgtattgctcctgactatatcctgtgtgaagcctcctcccaggatcaaatcgtacagaagattaaggatacggtgaaggacttttatggggaaaatgtaaaagcttctcctgattatgaaaggatcatcaaccttcgtcactttaagaggataaaaagtttgcttgaaggacagaaaatagcttttggtggggagactgatgaagctacacgctacatagccccaaccatactcactgatgttgaccctaactccaaggtgatgcaagaagaaatttttggaccaattctcccaatagtgtctgtgaaaaatgtggaggaagccataaatttcataaatgatcgcgaaaagcccctggcactctacatattttctcacaacaataagctcatcaaacgggtgattgatgagacatccagtggtggagtcacaggcaatgatgtcatcatgcacttcactgttaattctttgccctttggaggtgtgggtgccagtggaatgggggcttatcatggcaaatacagtttcgataccttttctcatcagcgcccctgcttgttaaaagggttaaagggagagagtgttaacaaactcaggtaccctcccaacagcgagtccaaggtcagctggtcgaaattcttcctgctgaaacagttcaacaaaggaaggctgcagctgctgcttctcgtgtgcttggttgcggttgcagctgtgatcgtcaaggatcagctgtgatgacttccttgtagcctctactgaagtacccctcggccaaatggttaacacaccaatgcttttaaaattgtacccaaaccaggaaatgaaattcacaggtgaactgcagtcaaacctaagttgttgccacaaaccactgatgaaactcagtgcttcagccaaatcccagcatttgtcagccgtgcaggtgctgagagggtggagactgggaggggcgacacctagtccatggcagcgggatgtcagggagactcgacaactgctcccgcactctttgctccaggacatagctctcccacccggtgtcaacaccctccaggctttccagctgtcctctgattgctgaggttcctgttagggacccaggtactaaacctgggcgggtggatttgtcggcctcatccattgtggctcgagaccggccttcgggagtcggctctcagtctaaacatcctttctcattcatagtgtgtcacccgaagatgcttgtttgtgacattgtgacagtctgtcatgactgtcccggtgcctttgtgatgacttaaactacactgaggagcttgccaacttgtgaatgcccttcagagggtctggcagtcacagctgttccagagcccgagggacgaagattccggagcccggagtttgaggccaacctaggcaacataatgggaccctctcattattattcctccataacaatcccctcgagaccctcgatttgaatgttatataggtcttcaggataaatctgcttattttcacagcacaacacaaaaaaaatttacttttgaaatcttagagagattcctacagatcttagcatggagctgttcctgtagtgaaaggggggttattagacatgaggcttcagaactcatggggcagggttgttggagactaccgtgagctgagggggcacactgaagcgatgggatggccagaagcgcacctgagcaagcggggcagcattctctgtcagaccctaacatggctacacggggatgtggcagagagatctgtgccgttggctgccagcgctggttaggcctgaagctccaagctgcagaggtctcattgccttcccaggatccaaattaagactgcccactcaatgagaatgtcacttgcgtatgtacaaccatgtttgctgagtaacctgttccaccgttgaggctgtctgaagtgtattgtatgaggtatcaagaacgagtcattggcccatttggcaaatagttgcttatgtagcaattgtcatggactaatcataaaatattttgcacaaaatttcaatgttgaacttgcactcactgttgttaaattataaatcacagcttctagttaggccaaaatatttacatactctactaatcttcaaaataaatgtatcccggaattc

SEQ ID NO: 178 - DNA, 3046 bp, Homo sapiens
tttcccgagaagcggcagggacctcggcctccagcttaccgggcggatcgaagcagcggtcgggatggtactgctgggcttgctgcagtcaggcggctcggtgctcgggcaggcgatggagcaggtgacaggaggcaacctgctttccacgctgctcatcgcctgcgccttcacgcttagccttgtctacctgttccgcctcgcagtgggccacatggtccagctgcccgctggagcgaaaagtccgccatatatttactctccaattccgttccttggccacgcgatagcatttgggaaaagtccaattgagttcctggaaaatgcatatgagaagtacggacctgtgtttagctttaccatggtgggcaagactttcacttaccttttggggagtgacgcagccgccctgctcttcaacagtaagaacgaagacctgaatgcggaagaggtctacggtcggctgacaacgcccgtgtttgggaagggagttgcatacgacgtgccaaatgcagttttcctggaacagaagaaaatactaaaaagcggccttaacatagcccacttcaagcagtatgtttctatcattgaaaaagaagcgaaggagtactttaaaagttggggagaaagcggagaaagaaatgtgtttgaagcgctgtctgagctcataattttaacagctagccattgcttacatggaaaggaaattagaagtcagctcaacgagaaggtggctcagctgtacgcagacctggatggaggctttagccatgccgcctggctgttgccaggctggctgcccctgccgagtttcaggcgcagggacagagcccatcgagagatcaagaatattttctacaaggccatccagaaacgtaggctgtcaaaagaaccagccgaggacattcttcaaactttactggattctacatacaaggatgggcgtcctctgacggacgacgagatcgcagggatgctcatcggactgctgctggccggacagcacacatcctccaccaccagtgcctggatgggcttctttctggccagagataaaccacttcaagacaaatgctacttagaacagaaaacggtgtgcggggaggatctgcctcccttaacttatgagcagttgaaggatctgaatttacttgatagatgcataaaagaaacactaagactgaggcctcctataatgaccatgatgagaatggccaagacccctcagactgtggctgggtacaccattcctccaggacatcaggtgtgtgtttctccaactgtcaatcaaagactgaaagactcctgggtagaacgcttggacttcaatcctgaccgctacctacaggacaacccagcgtcgggagagaagtttgcctatgtgccgtttggagccgggcgccatcgttgtattggagaaaattttgcctatgttcaaattaagacaatttggtccactatgcttcgtttatatgaatttgacctcatcaatggatattttcccagtgtgaattatacaacaatgattcataccccagaaaacccagtaatccgttacaaacgaagatcaaaatgaagaaaggaacaaggagccagtgtggagacgggactgcaagctgcagcttggcagagaatgaagctttgacacagctttcatactgtactgttttttaagtgtgtggttctgaaagccagtttgattttaatgttttattaactcggtgatttttgtcagacctaatggcatttgaaacagttataatagttctgataggatttcagggaagccaagtttatgttagaaatcgtttaggggagcctcggtattcagagatgatacagaatatagcatccaggtaactaacttcagaagcacacgttgccgtagggagattccggcttggaactagtttgggaagttttaagcctggtcagatgctacagaggcaatgggtcattggtgtggttgggccacttctgtgcgtaaagatgtgagagggtgaaggataagttttctgcgaagctctagatggtgtgagtgccctttgtagtgttaactgagagcaccactccagcgagatggcagcaatcttggaccttatcttgataaccttatttcctaaaaataataaatactaaagagtacttatgttattggttccagaaaaatccaaaatcaaatccttgtggaatttttaattttaattaaaaaaaaaaaaacaagtaccatgattttaaaagtgtatgattctgagcttagtgaattctggccttgagattgaggaatggggacatggtatcattgcccgtgttctttggaggctgtgctcaggagccaacctaacagattgttaccatgggcctaattctgacctgcccataatctgtattaggaatcaagagatctgttgctgggtgtggtgctgcacacctgtaatactagtgctcgggctgaggcaggaggattgagagtttgaggccaacctaggctacatagcaagacttaacaccctccccaaaataaaaccttttttctctaaagtatgtgtactggctggtcttaggtgacaacctgacacacgctagggtcatcagagaaaagggaacctcagttgaggaaatgctgtaaggatgcttagtggtcaatgagagagggcccagcccactgtgggtggttccacccctaggctggtcatcctgggtcctaagaaagcaggctgactaagacaccaggagcaagacagtaagcagcatccttcatggcctctgcatcagctcctgccttaggttcctgacccgcttgagttcccgtcctgactttctttgataatgaacagtagtatggaagtgtaagccaaataacccacccccaccctcccaacttgctttttgctcatggtgttttgtagcaatagaaaccctaactgttacagctgtaagaggcttttgaagactcttcaaatgaaggcccaaatctctgctgttaaaggtttcagattaaaattctctatgagaaaaaaaaaaaaaaaaaaaaaaaaaaaaaaaa

SEQ ID NO: 179 - DNA, 787 bp, Homo sapiens
gcacttctcggatcctcagcccagtgcttctagatcctcagccctgaccagctcagccaagaccatgaccgagcgccgcgtgcccttctcgctactgcggagccccagctgggagccgttccgggactggtaccctgcccacagccgcctcttcgatcaagctttcggggtgcctcggtttcccgatgagtggtctcagtggttcagctccgctggttggcccggctatgtgcgccctctgcccgccgcgaccgccgagggccccgcagcagtgaccctggcccggccgttcagccgggcgctcaaccggcaactcagcagcggtgtgtcagagatccgacagacggccgatcgctggcgcgtgtccctggacgtcaaccacttcgctcctgaggagctcacagtgaagaccaaggaaggcgtggtggagatcactggcaagcacgaagaaaggcaggatgaacatggctacatctctcggtgcttcacccggaaatacacgctccctccaggtgtggaccccaccttggtgtcctcttccctgtcccctgagggcacactcacggtggaggctccgctgcccaaagcagtcacacaatcagcggagatcaccattccggtcactttcgaggcccgtgcccaaattggaggcccagagtcggaacagtctggagccaagtagaagccttcagcttgctacccatccccagtagccgtcaccagccctccctctctgtcaatctgaatgctcttttgatacatgtactttctgttttactcaaataaa

SEQ ID NO: 180 - DNA, 8924 bp, Homo sapiens
  misc_feature (2574)..(2673): n is a, c, g, or t
aattcaaggccagtgagtgagctccagatcacaggctacagagtgagacctggtctcaaagtgccaacatagctaaatatgtagagaattgtagcctttgtcccacagcaaatggacacctgtgaaaagataattccctactttaatgattcctgttatatgttagacatgtactatagacttcttggaaaaatttcctactactatcccaactttacaggctaaagacagaggaattgaggttgcttatcctgttagttaacagtagaatcacgacccaaagccacgaatggcagcccctatattaccctatgagcaagagagaggctaatgatgtataactgagtctaatcctcttggcaggatgagacagctggggaagctgagagcataggggtgtcagaatttaatgagctaatcattgaatttaaccccctccctattaataaaataaccttttaattatactctggcttccatatagatttttctgctggaaggtaatgtactgaccagtctccacaggcattttggtctgtttggcaattttattactcactgtgaattatatttaatggccgagccatctctctagctcctaaacaggtaaaaattatgaaagtcttgactattttctcatgaagggcttgttttaaaaataaaaaccaacgaataagaacaaaatatcatcatgctgcctgccatgcaaggatgtggtttctgacatggagatgagctgtgtcccttatcttctttgttgaggctcctagcaaagcctaagagcttcctttgtttcccacagtgcctttctcaaactcccacctttgcactggcacacaccctagagggaaatgcttttgcttttcacagtgtacctaattttctgagccctggcagctggcagtcgaggttgtcattcagcttcacagtgtcaggtgcatcttatgctaggggcaggctgttccctaacattataaaacccgatattcgtgacaaatggtggttctcagaagccactagcctccaggcctgccctaaggctggtcccaacagttgtgtgccgctgcgctcatactgggtttctgcatgcaattcgctccagactccagtctttgtataagttttatttcactttttcttcatcttcagtctgttaactcatttcatgagcaaaactgagaaaactgcaaaggtttaaaagataaagtcttctgaaattgaggccatttgaccttgacaagcttgaagacttgattagcgccaccaccacccctcccccccccgccccaagaaacattcttatattctctcgaacaggttgaaacatccatttcttcctaggaagctcggaaaaccaagccaagcatagtcggatttaggacagaaaaggatctagcacggtctcagactccaaggatccacgaggccaggagaggggggaggggaggccggcaagtgacaattgtttagaaaaacaatacagcattccggttagttggctttacagccattttcccccagagcagttactcgagaaatgactaacggactgaagcccctctgaatctctcgtcccccggagggaacggcgtaggatgaataggtgcgtgcaaattagcctccgctagccagccaacatggccaccttcacgtggcagagggccacccggcactggtgcacgaggcggcgaaaggcgggggatgtgggtggggtggagagaccctcggcgagaaccacgacacaaaacggccgccacccccgcggccgccgctgtggggcgcgcgcgccggccgacctccgtgggcaacggtcggaagggacgtaccatatcatcgtataagggagaccgcccttcaaatccaaattgtctcttctccagcaacagacgtgggaaggggcgtaaaagccaagtctactcactcactcacatctccatttaacccacgccatcaggatgactaactactgtcagggggcacggttagttctgatcgctccccccgtcgatagaatggtccagcccgagctcctctccgcgcaccaccctgccaacccccatccgcctgcccgtggcgcattggcgcgcgacgtcgaggggcggggcccgagccgggcgcgcgcgggagctgctctataaatactgggccgcttcgcccgccgcttcattcgctccgagactccagcctgctgagagttgaagcgaccctcctgcatctgcgccctccgcagtcctctgcctcgttgccgctccgtctccccagagtcgccttctctcatcgctgcagccatgaacgggcagctcaacggcttccatgaggcgttcatcgaggaggggacattccttttcacttcagagtctgtaggggaaggtcatccaggtgagccgaccgggaagggcggagtgcagtggcgcttggggtgggggaggtcgaggctggctcccgcggcgggcacagtggcggccttccctcgtgtcgctgcgagtttgcaatgtgtgtccccgttcccctccccctttctccgttcctcatcggtggcgcccccggcttgcggaaggttccagaaatctagannnnnnnnnnnnnnnnnnnnnnnnnnnnnnnnnnnnnnnnnnnnnnnnnnnnnnnnnnnnnnnnnnnnnnnnnnnnnnnnnnnnnnnnnnnnnnnnnnnntctagagtggttctacatatggctttggttctttcagaacccccaagtccattggtttggtactaagttatataacaagaaactgagtgttgtctaataataggggaaaggcactttttaaagaagttagtgaccttgacaattggctccttagtgggattgtaacagatttttaaatgtgggggataaactagaacagttgtctttaaaatatactgtgaagttatttcctatggtaggctttgagatttcaagataaatcacctttttgactctgaataatttaagtttacatgactgttctgtatttaacaaaaaattgtttggctaggatattagactttcgaaatctgaaatatatatccaggtgtaactagattcattgtaggtgtaaatgggctaaggtgtgttaaatatgctgaaagttattgcctaattgaattggtgagcttgtgttactaatattaaggcctcaatattgtttctaagtaacatgtccctatatacaatttgtattccagcaaatagctcctgataaaaacagtgctttagtaatagtaaagctctccatacttcatgcactggtgttgaatttgttcccttcagagttccgggggtactgccagtgagattggtcaggcggttaagagtgcttgttcccaagcctgttgtgacctgagtttaatccctggacctaggacacataatggagagaagcccatacctcttaatgttttcagttgaacaccatcgcacaagtgtgagccatgtatcgaagtaatgcagcatttttaaaatttgataatcacctacaaattcatagctatatttgaacctcaggttagacataaacttagttacagaagatagggttaatagtaatagttaagttgaaccaggaatttttattttccagataagatttgtgaccaaatcaatgatgctgtccttgatgcacaccttcagcaggaccctgatgctaaagtggcttgtggtaggtacaaaaccctgcttatgagtgggggaaaagggttttgtttttgtttttgtttttttcccctcagagctggggaccgaacccagggccttgtgcttgctaggcaagcgctctaccactgagctaaatccccaaccccggaaaaagggcttttaaagcctacctaaagtattataggtaataccagctacttgggaggctgaggctggagggagcatgttaaataaagtcctatgtgggtaatttgccaagaccttatctcaaaaatagaaaatgaagcccagggatatagcatgtataacataatttgagtccctcagtcccaccccagtcaccctcattgaatagggtgatatctttaaatatcaagtctaaatttttgttttattagaaactgttgctaaaactggaatgatccttcttgctggggaaattacatctagagctgccattgattaccagaaagtggttcgtgaagccataaagcacattggctatgatgattcttccaaaggtaggttatagaggggtcccccccccccccgtaaactcaattttgcagataaagaatgtgatgctagagtgaagcttctagaatattccttccttgaaatctttgattctggttgcatagttaaacaatatcctctcatctttctgaggctgcctattctgtcctctaaaatgctacatttattgtaaaagcagtctcttatcctacaaataaacagatttatatcaatagtagccagatacgatatgcctgtaagctcagcttctcagtgtcagtgtgggagttaggtgtgcttagttgtagtttgaagctaaccaagttagagaccttgtttcaaactgttgtctagagggggcaggcctcctagagagtcttttaagagtgcttgaccacttactttggcatgtccagaattctagcagcagcacagcactgccattaacattttggaagttaaaacaaggattattggaacaccttgttttatagggtttgactacaagacttgtaatgtgttggttgccttggaacaacagtcaccagatatcgcccaaggtgttcatcttgaccggaatgaggaagacattggtgcaggagatcaggtattgtgatagtttgttaggatctcttaacttattctaaattctaaagcttgtattgaccacttcttcatatttttagggtttgatgtttggttatgccactgatgaaactgaagagtgtatgcctttaactattgtcttagcacacaagctaaatgctaaactggctgagctacgccgcaatggcacattgccttggttacgcccagattctaaaactcaagtaagtggcaatcctaaacctacatttgtctcaaatcacattaaaattcccaagtaagttaactatagctgaatggggaggataatacttgtctttactatatttaaacttgggaagagaacccctataaagctgttgagttagacaagtattctcgtctgtttggcattcaaggtgactgtgcagtatatgcaagatcgaggtgctgtgattcccatcagagtccatacaattgttatatctgttcagcatgatgaagaagtttgtcttgatgaaatgagggatgctctgaaggagaaattgatcaaagctgttgtacctgcaaagtaccttgatgaggatacaatttaccacctacagccaagtggcagattcgttattggtgggcctcaggtaatagatgaaatgcctatggtttatcattggttactaaaaactttggctgccactattttttttctagctaccctgccctgttccctttacacacactcacttgtaaggcagggaaaagttggatcagagttacggccagcctggattacaaagcaggttcctagacagccagggctattacacagactctcacagaaaagaaaaaattacatgacttaaatcctataattccagggtgatgctggtttgactggccgaaaaatcattgtggatacttatggcggttggggagctcatggaggaggggccttttcaggaaaggattataccaaagtggaccgttcagctgcttatgctgctcgttgggtggcaaaatcccttgttaaaggaggtctgtgcaggagggttcttgttcaggtatgtaatgagtgaacgttacatgggagaagggtacttagttaaatgtttcaaatactttcctcttttataacaacgtcttactgacttttaggtctcttatgctattggagtttctcatccattgtcgatctccattttccattatggtacttctcagaagagtgagagagagctattagaaattgtgaagaataattttgatcttcgccctggggtcattgtcaggtaaagatggtaaagcctattgctagtgagaaataggggggtggaacatatactaaaatctgaggaggtaaaggtagcctcctcatgagggaaaacattttaattgctggaacatgccaatattttaaattggctggagagggacctagttgttctgtgacttaacattctagaaaggtctccatctttgattcttagctttgtgcttatcttaaataagggtactacattaagaattaatgagttaaagtgggatgctcaaagttaaaagaaaataaccatagtgatcattggttggaccttggtaagtactcaattggaattcctgagaatgataagtttttgtatttgtcaagccagggctggaaaacgagaactgtagttattaatggggactgtgcaagtaacacaagggaagtaacaaacacttttgccatgaacttttttcctagcaaaccccagggagaactgaactcatttgccagagctcttgaaatgagtcttgctgattgttttgctttgttttaatttaatgctacatattaagttatggacttatatattccagggatctggatctgaagaagccaatttatcagaggactgcagcctatggccactttggtagggacagcttcccctgggaagtgcccaaaaagcttaaatattgaaagtgttagccttttttccccagacttgttggcgtaggttacagagaagccttcaagctctgagggaaagggcctttttcctaaatttttctgtcctctttcagctcctgatcagttgcagtcactctaatcaatgacatgaattttagcttttgttggggactgtaagttgggcttgctattctgtccctaggtgttttgttcaccattataatggatatagtaagcataggtgacccatgtaactgcctagaaacaaacactgtagtgaataatgctttgaaatcgaacctttgtgccctatcacctaatcctccaaagtcctaattgcaattactttcccaccagatgctgaaaatgtccttgtaatgtgcacgtaaagtacttgtgtttgactcacagccctgtcagcatgaatttgtaatgtcttgagctctatttattgaatgtgaagccccctccttcccttatcctccctgtaactcagtcatttctaattatgtagttctttgtcagggagtgttcctatccaatcaaacttgcatgaaacgaaaagtttcaattggagctctagcctgacttaaagaaaaaggcagttacaattaaaccatctccctggtgcttatgctataaattgccacctcaaacagcaccaaatcaaaatctctccacttttcagctgtctttggaggacgtagtaataaggttttatttagtaaaccaatcctatgcatggtttcagcactagccaaacctcaccaacttttagtctagaaaacaggcacttggcacccttgtgatgtcatacagagaagtcacagggcagtacccgagggtctgtaggttgcacactttggtaccaggtaacttttttttctttataagaaagagtactccacactgcacaatagctcctcccagggtttttaactttgttttattttcaaaaccaggtccaatgagctttctgaacagctggtgtagctacagagaaaccagcttccttcagagagcagtgcttttggcggggaggaggaaatcccttcatacttgaacattttctaattgcttatttattgtattctggggtatggcgtaagtacagagaagccatcacctcagatggcagcttttaaaagattttttttttctttgacaccatgattcctttaacatgtttccagcattcccaggtaggccaaggtgtcctacagaaaaaccttgggttagacctacagggggtctggctggtgttaacagaagggagggcagagctggtgcagctggccatggagaagctgacttggctggtgtggtacagagaagccagcttgtttacatgcttattccatgactgcttgccctaagcaagaaagtgcctttcaggatctatttttggaggttattacgtatgtctggttctcaattccaacagttaatgaagatctaaataaaatgctaggttctacccaaactaaactgtccattacttgtctgttgttgctttctgagttataatttatagcgtctgccacccattgccaccaataaagttttcaaccaggtctaagatagtcatgggggggttggggatttagctcagtggtagagcgcttgcctggaagcgcaaggcccttggttcggtccccagctccgaaaaaaagaaccaaaaaaaaaatagtcatgggtacttggtactgttcatacactggtgtgtggaggtcagaacctgagttatttacatttactacatgaggtcctggtaatgaatattcatgtcttaagtcttgggtaattagcccccttcccaataagcacctgtggcagaagcaagtagattctcaagttgaaggctcaacagttcccaggaacaggttaggggcttttgtggtgataggaatttagtttatttgctagataagcattttgtttagcactaaaaacatgagatttgtttatactgtgcctggtggtgatggtatgttccttaaatcctagtacttggaaggcaaagatgaacataatatagttcatcagtttctgggagtctaagaaaagtggcacatgtatctatcccagcattgaagagattgagttaacatgggcaaacccttatctcaagcttttagatgcttgtttgctcaagacaggaaccagagagattgctcaatggagtggtaagaaccaggacaaatgggaattc

SEQ ID NO: 181 - DNA, 1451 bp, Homo sapiens
gccaggcgccctgccgctggacactgtagaacggcgggcggaacgcagacctgggttcgggctgttgcagtgtccgccggagcggtttggggagtgcacggggtgaagatggcggaggagcggcaggacgcgttgagggagttcgtggcggtgacgggcgctgaggaggaccgggcccgtttcttcttggagtcagctggctgggacctgcagattgcacttgcaagcttttatgaggatggaggggatgaagacattgtgaccatttcacaggcaaccccaagttcagtgtccagaggcacagctcctagtgataatagagtaacatccttcagagacctcattcatgaccaagatgaagaggaagaggaagaagagggacagaggttttatgctgggggctcagagagaagtggacagcagattgttggtcctccccggaagaaaagtcccaacgagctggtggatgatctgtttaagggtgccaaagagcatggggctgtagctgtggaacgagtgaccaagagccctggagagaccagtaaaccgagaccatttgcaggagggggctaccgccttggagcagcaccagaagaggagtctgcctatgtggcaggagaaaggaggcggcattcaggccaggatgttcatgtagtgctaaagctctggaaaactggattcagcctagacaatggtgaccttagaagctaccaagacccatccaatgcccagtttctggagtctatccgtagaggggaggttcctgcagagcttcggaggttagctcacggtgggcaggtgaacttggatatggaggatcatcgggacgaggacttcgtgaagcccaagggagctttcaaagccttcactggcgagggccagaaactaggcagcacggccccgcaggttttaaacaccagctctccagcccagcaagcagaaaatgaagccaaagctagctcgtccatcttaatcaatgaggcagaacctaccacgaacatccaaatccgactggcagatggcgggagactggtgcagaaattcaaccacagccacaggatcagcgacatccggctcttcatcgtggatgcacggccggctatggctgccaccagttttgtccttatgactaccttccctaacaaagagctggctgatgagaaccaaaccctgaaggaagccaatcttctcaacgctgtcatcgtgcagcggttaacataaccgcccagctgctgcctcacctccctatgtgtcccccatgactgtggccatgcccgtggggattacctcctgccccctgtacacctagctcttccagtgccacgtctcgtccgtagctctggattcttagacttcagttggacatttgttttctctttagttgtatttcctgggtttttgtgatgatcaatggactttaaagaaaaaaaataaaaaacacaaaaaattgg

SEQ ID NO: 182 - DNA, 1451 bp, Homo sapiens; identical to SEQ ID NO: 181

SEQ ID NO: 183 - DNA, 2015 bp, Homo sapiens
gtgagagttcctttatacgttacacattcctcctctaagacgagaccactccaggctgaaagtagtgaagattttaaaacttactctgatgaaaactttctttttaaaacagggcgccatcgttgtattggagaaaattttgcctatgttcaaattaagacaatttggtccactatgcttcgtttatatgaatttgacctcatcaatggatattttcccagtgtgaattatacaacaatgattcataccccagaaaacccagtaatccgttacaaacgaagatcaaaatgaagaaaggaacaaggagccagtgtggagacgggactgcaagctgcagcttggcagagaatgaagctttgacacagctttcatactgtactgttttttaagtgtgtggttctgaaagccagtttgattttaatgttttattaactcggtgatttttgtcagacctaatggcatttgaaacagttataatagttctgataggatttcagggaagccaagtttatgttagaaatcgtttaggggagcctcggtattcagagatgatacagaatatagcatccaggtaactaacttcagaagcacacgttgccgtagggagattccggcttggaactagtttgggaagttttaagcctggtcagatgctacagaggcaatgggtcattggtgtggttgggccacttctgtgcgtaaagatgtgagagggtgaaggataagttttctgcgaagctctagatggtgtgagtgccctttgtagtgttaactgagagcaccactccagcgagatggcagcaatcttggaccttatcttgataaccttatttcctaaaaataataaatactaaagagtacttatgttattggttccagaaaaatccaaaatcaaatccttgtggaatttttaattttaattaaaaaaaaaaaaaaacaagtaccatgattttaaaagtgtatgattctgagcttagtgaattctggccttgagattgaggaatggggacatggtatcattgcccgtgttctttggaggctgtgctcaggagccaacctaacagattgttaccatgggcctaattctgacctgcccataatctgtattaggaatcaagagatctgttgctgggtgtggtgctgcacacctgtaatactagtgctcgggctgaggcagaaggattgagagtttgaggccaacctagagctacatagcaagacttaacaccctccccaaaataaaaccttttttctctaaagtatgtgtactggctggtcttaggtgacaacctgacacacgctagggtcatcagagaaaagggaacctcagttgaggaaatgctgtaaggatgcttagtggtcaatgagagagggcccagcccactgtgggtggttccacccctaggctggtcatcctgggtcctaagaaagcaggctgactaagacaccaggagcaagacagtaagcagcatccttcatggcctctgcatcagctcctgccttaggttcctgacccgcttgagttcccgtcctgactttctttgataatgaacagtagtatggaagtgtaagccaaataacccacccccaccctcccaacttgctttttgctcatggtgttttgtagcaatagaaaccctaactgttacagctgtaagaggcttttgaagactcttcaaatgaaggcccaaatctctgctgttaaaggtttcagattaaaattctctatgagaaaagttttgctggtctatattcatggatttgaagctgtgcttcagtaagtacagttcaagaggtctgggaatggggttggggatttagctcagtggtagagcgcttgcctaggaagcgcaaggccctgggttcggtccccagctccgaaaaaaagaacaaaaaaaaaagaggtctgggaattcagaaacttagatcctatttgcctgaaatcggctcccttcagtattacctttagttatttagataagtcactctcgtgatccgttgacctgcaggtcgac

SEQ ID NO: 184 - DNA, 1568 bp, Homo sapiens
cgtccccagtcctttaaaagcgcagagtctagcggaccagtctgagttctggagttaagtgagcacatctccttcagctggtgcagctcctggagctctgactcccaccttccggagcagatatgtctggggagcagacgccgatgtgtagtatggacctacgtgagatcaaggggaaggagaccaacatggctgacagttaccatggcatgtcctggtatgagcagtacatacaaccgtgtgtggtggaacttttgggctccgctctcttcatcttcattgggtgtctatcggtcatcgagaacagtccaaatactgggctcctgcagcctgccctggctcatgggctggccttggggctcatcattgctaccttggggaacatcagcggtggacacttcaaccctgctgtgtcgctggcagtcacactggttggaggcctcaagaccatgctgctaattccctactgggtctcccagctgtttgggggaatgatcggagctgccctggctaaggtggtgagtccagaggaaaggttctggaatgcgtctggggcagcctttgccatagtccaggagcaggagcaggtggcagaagccctgggggtagagatcgttatgacgatgctgttggtattggctgtgtgtatgggtgccgtcaatgagaagacaatgggtcccctagccccattctccattggtttctctgtcattgtggatatcctggcaggtggtgggatctctggagcctgcatgaaccctgctcgtgcctttggacctgctgtgatggctggctactgggacttccattggatctactggctgggcccactcctggctggcctctttgtgggactgctcattaggctcttcattggagatgagaaaacccgcctgattctaaagtcgaggtgaagaactgctggcagcatccccactgcctggagtcctcagctgtttgtcctgagttgaggacaggacaattccattattttctgcaggacctgagctcagaggagccactctgacagcagcagaccttggcctggcttcccaggcaggcaggcagctgctgctgtcctgagcatgctcctggaacctggaactcctttgtgcccatggactgggcttggggcccagcctaaagacatgtagagaccacatagaaaaggaggacaggtctctgttcttgagaaagggcagggcatgggagagccgagcaggtggagcatgcagttgctaatgcacactgttcatttttccagccctctttcttttttactgtgttgggtttggaacccagtccatgcgtactaggtgagcactttgctacggagcctcctgttctccccaccctctttcctcttggttacactgttacagaagggctttcaggagcccaaagatctccttgcctccccagctgccaatctgactttgtaataaatggcttagtgtttcctgaaaaaaaaaaaaaaaaaaaaaaaaaaaaaaaaaaaaaaaaaaaaaaaaaaaaaaaaaaaaaaaaaaaaaaaaaaaaaaaaaaaaaaaaaaaaaaaaaaaaaaaaa

SEQ ID NO: 185 - DNA, 2525 bp, Homo sapiens
tcaccctgcgggctcctccgcttcccggtcttgctttccctttggctctgtccccactgaggagtccgctgtcccagccatggcgcgtgctaccggacccgagcagcggctgctggccatctacactggcggcaccatcggcatgcggagtgaaggcggagtgctggtacctgggagaggcctggctgctgtcctgaggacacttcacatgctccacgatgaagagtatgccagagcccacagcctgcccgaggatacgctggtgttgcccccggccagttctgaccagaggatcatctacaaggtgctggagtgccagccactcttcgactccagtgacatgaccatcactgaatgggttcagattgcccaaacgatagagagacactacacacagtaccagggctttgtggtcatccacggcacggacaccatggcctttgctgcgtcagtgctctctttcatgctggaaaacctgcagaaaccggtcatcctcacaggtgcccaggttcctatccacgaactgtggagtgatggccgtgagaacctgctgggggctctgctcatggctggccagtacgtcatccctgaggtctgcctgttcttccagaatcagctctttcggggcaatcggacaaccaaggtggacgctcggagatttgcggccttctgctcccctaacctgccccctctagccactgtgggcgcagacgtaacaatcaaccgtgagctggtacggaaggccagttggaagagccacctggtggtccacagcaacatggagcctgatgtgggcctactgcgcctctaccctgggattcccgcctccctggtccggaccttcctccagcccccactgaagggcgtggtcatggagacctttggctccgggaatgggcccaccaagccggacctaatacaggagctccgggcggcggccgaaagaggcctgatcattgtcaactgtacccattgccttcagggggctgtgacttccgactatgcacctgggatggccatggcaggagccggcataatctcaggcttcgacatgacatcagaagctgccctggccaaactgtcctatgtgctgggccagccagggctgagcctgagtgacaggaagaagctgctggccaaggatcttcgcggggagatgacactgcctacaacagatgacttgctgggagatgacatgctgggctgcagggccacatggcttctcagtatgaatggcagccaggatgccgatgccatgaaggatgttctgctgcccggcctggccctggctgcagctcatgctggtgacctggacactctgcaggcctttgtggagctgggcagagacctcaacctgaaggactacagtggccagacgccactgcatgtggctgcacggagagggcatgcttcagtggtcgccatgctactgcagaagggtgtggatgtggatgcctgtaatgaggacggtcagagcccactgctgctggccgtgaggggcaggcatcagagtgtcatcaggctgctgagggccgctggggctcacctgtctccccaggagctggaggacgtggggacagagctgtgcaggctggcatcaagggcggacagcgaaggcctgcgggcgtggtggcaggctggggctgacctaggacagccggactatgatggacactgtgccctgcaagttgctgaagcagcagggaatgcagatgtggtggctctgctgcagagtcttgaggacagggtcagcgcccagccccagccccattagttcttgggctggtctgatgcctcctcagtgaactctcattggtttacgactggatcctggcaccagagccagttctggagacggctagaggaagtgggcataagagatgggtcattcgtccagagcccttcttggggaccccgagagtaaacacggtcttcgggagatagggctggtggggcttcgtgtagaagcccagctcagaccttcaccctacccagtctggagctgattgactggaaggacctaggcctgctcccagctgacatccatccccactgctctggagttttgaggcttggcggactatcctcaactcctgggactgcctggattccatacacaaggcttctggggtggagtacggggaggcctgccctggatgcatccctgtagtcctcggaagaccttgtttccaggaagtgctccttggcccccaacctgttgcagcaggagctgtgtcttactgcccgtgggacctcacgcacataccagcagactggctgctatgttagcaccattctagttggtgagacctcgaagctttcagaagccagctctgttctggccttgttatctcctgcagccaggtgtcccaggagctgactcagagctatggactcctcctccctaagttgcgggggcgggggggggggtcgtcttctgctaaactgcttcccagcctgttggcatgacaaatctggaggtctttgttgagtagaatgtcaataaagccatccggacagctgct

SEQ ID NO: 186 - DNA, 2201 bp, Homo sapiens
atgatgtattctcccatctgtctcactcaggatgaattccacccatttattgaggcgcttcttccacacgtccgtgcaatcgcctatacgtggttcaacctgcaggctcgaaaacgcaagtactttaaaaagcatgagaagcggatgtcgaaggatgaagaaagagcagtcaaagatgagctgctcagtgaaaagcctgaaatcaaacagaagtgggcatccaggctcctggccaagctgcgcaaagatatccgccaggagtaccgcgaggactttgtgcttaccgtgactggcaagaagcacccgtgctgtgtcttatccaatccagaccagaagggtaagattaggaggatcgactgcctgcgacaggcagacaaagtctggcgtctggatctagtcatggtgatcctgttcaaaggcatccctttggagagtaccgatggagagcgacttatgaagtccccacactgcacaaacccagcactttgtgtgcagccgcaccatatcacagtatcagttaaggagcttgacctgtttttggcatactacgtgcaggagcaagattctgggcaatcaggaagtccaagccacaatgatcctgccaagaatcctccagggtacctagaggacagttttgtaaaatccggagtcttcaacgtatcagagcttgtgagagtatccagaacacccataacccaggggactggagtcaacttcccaatcggagaaatccccagccaaccatactatcatgacatgaactctggcgtgaacctgcagaggtcgctgtcttctccaccgagcagcaaaagacccaaaactatatccatagatgaaaatatggagccaagtcctacaggagacttttacccctctccaaattcaccagctgctggaagtcgaacatggcatgagcgagatcaagatatgtcttctccaactacaatgaagaagcctgagaagccactgtttagctctacatctccacaggattcttccccaagattgagcacttttccccagcaccaccatcccggaatacctggagtcgcgcacagtgtcatctcaactcgaactccacctccaccctcaccgttgccatttccaacgcaagctatccttcctccagcaccatcaagttacttttctcatccaacaatcagatatcctcctcacctgaatcctcaggatactctgaagaactatgtaccttcttatgacccgtccagtcctcaaacgagccagcctaacagcagtggtcaagtagtagggaaagtgcctggccatttcacgcctgtcttggcaccctctccccatcccagtgcagtgcgacctgtgaccctgaccatgacagatactaaacccatcactacatccactgaagcctacacagcctcaggcacatctcaagccaatcgatatgtgggactaagcccaagagacccatccttcctgcatcagcaacagtcctggtacctgggctagcttggttccttttcaagtgtcaaataggacacccatcttaccggcaaatgtccaaaattatggtttgaacataattggagaacctttccttcaagcggagacaagcaactgaggggaaagaaacacaaccatagtgtaagaaaattaggggaaaaacacccaacaaaagaaaagaggaagactggacaacagggagaaaggagagaaactgaagaaagaagacgctagaccagcattgcagcacttccggtcactaattcccttaaggttgagactgtagtgacaggaaagggtcaatgacatctcaccgatgctagactgcagcccctgcaccgtagcctttgttccatgaagtccgctgggaaatagatgttctgtctctatgacaatatattttaactgactttctagatgccttaatatttgcatgataagctagttttcttggttagtattcttgttgtttacgcatggagtcactattcctggttatctcaacaacgaaggctaggaggcggcgtcagaggggctggggacagagccatgagccagccattttataagcactctgatttctaaaagttaaaaaaaattatatatatatatatataaaaatctctgtagcctttagttatccgtacagatttattaaattttggcccttaacccagccttttccagtgtgtaacccagtttgaaaatcttaaaaaaaaaaa

SEQ ID NO: 187 - DNA, 2318 bp, Homo sapiens
ggagcggcgggcggagaggtgtgtggagcttgtggcttgggaggaaggcgctgtccgagagaacgtgatctgcgcggccgctgtgtcctggccttggaagtggttcagtcatggttgagatcaagaagatctgttgcattggtgcgggctacgtcggcggacccacatgcagtgtcattgctcgcatgtgccctgaaatcagggtaacggttgtggatgtcaatgaggccaggatcaatgcatggaattctccaacgcttcctatttatgagcctggactaaaagaagtagtcgaatcctgtcgagggaaaaacctctttttttctaccaatattgatgatgccatcagagaagccgatctagtgtttatttctgtgaacacaccaacaaaaacatatggaatgggaaaaggccgggcggcagatctgaagtatatcgaagcttgtgctcgccgcattgtgcagaactcaaatgggtacaaaattgtgactgagaaaagcacagtccctgtgcgggcagcggaaagcatccgccgcatatttgatgccaacacaaagcccaacttgaatctacaggttctgtccaatcctgagttcttggcagagggaacagccatcaaggacctaaagaacccagacagagtcctgattggaggggatgagaccccagagggccagagagctgttcaggcactctgtgctgtgtacgagcactgggttcccaaggaaaagatcctcaccaccaacacttggtcctcagagctttccaaactggcagccaatgcttttcttgcccagaggatcagcagcattaactccataagtgctctgtgtgaaagcacaggcgccgatgtggaagaggtggcaacggctatcgggatggaccaaagaattggaaataagtttctaaaagccagcgttggttttggtgggggctgcttccaaaaagatgttctgaatttggtttatctctgtgaggctctgaatctgcccgaagtagctcgttactggcagcaggtcatagacatgaatgactaccagaggaggaggtttgcatcacggatcatagacagcctgtttaatacagtgactgataagaagatagctatcttggggtttgcgttcaaaaaggatactggtgataccagggagtcctccagtatctacattagcaaatacctgatggacgagggtgcgcacctccacatctacgaccccaaagtacccagggagcagatagtggtggatctttctcatccaggcgtctcagcggatgaccaagtgtccagactggtgaccatttccaaggatccatatgaagcatgtgatggcgcccatgccctcgttatctgcacagagtgggacatgtttaaggaactggattatgaacggattcataaaagaatgctgaagccagccttcatatttgatggccggcgtgtcctggatgggctccacaatgagctacagaccattggcttccagattgaaacaattggcaaaaaggtatcttccaagagaattccatacactcctggtgaaattccaaagtttagtcttcaggatccacctaacaagaagcccaaagtctagacgtcgcccttttgcctgtgatgatttggtactgcagggtagccagcgtctgtctgatactaagtggtaaatgaactacgtgtttttatggaaacaaaaatatttttgtaatcatcaaatttatactagctatctgggtgttagcatatctagtaattatgagtctagaataatttttatatatttttatattattgtactctcagttactgaatggatggaaaacaatcatgttggtttaaatgtcagtttttataaataaaaatgaaaccttgaattttttagcattacaggttgttacagactgcactgtaataacacaagggaaaggcagtctcatttccctacctgttgtctctgcttatcactaaatgggacttcgaagccgtgaaatcactgtgctaggatggctgatgaaggtctctggacttttgttttaatgagattatgtcattagtggttttagttgtctttgtgtctcccaaaaccactctgtctttctctccatgcgtaactcgggcagtgctttcttttttgaaaattcagcctgaggaggaaatcagtctatggtctagttcgtcctgcctcttagcttctgtacctgcttgtcacatttgcacctatgagtcaagatatgtttgttacctttattttgatttatttctattacaattcaatttttttcctttaattaagaaaaccaataaagtctcatgtgtaaactgg

SEQ ID NO: 188 - DNA, 1940 bp, Homo sapiens
cacaaccaccaaatatatccacacgttgacgtgatttcttgcccttactcacactaagcccgcgtgtcgatccatctctatggatcccgaacctactgaacactccaccggcggcggctcggttccccgccagccgcccagcgcgcagacggggcttgatgtccaggttgtcagcgcagctggcgactcaggtaccatgagccaggacaccgaagtggacatgaaagatgtggagctgaacgagctggaaccggagaagcagcctatgaatgcagcggacggggcggcagccggggagaagaacggtctggtgaagattaaggtggccgaagacgaggcggaagccggggtcaagttcacaggcttatccaaggaggagctattgaaggtagctggcagcccgggctgggtgcgcacccgctgggcgctgctgctgctcttctggctcggttggctgggtatgctggcgggcgccgtggttatcatcgttcgggcgccacgctgccgtgagctgccggtacagagatggtggcacaagggcgccctctaccgcatcggcgaccttcaggccttcgtaggcccggaagcgagaggcatagctggtctgaagaaccatctggagtacttgagcaccctgaaggtgaagggcctagttttgggcccaattcacaagaaccagaaggatgaagtcaatgaaaccgacttgaaacagattgatcccgatttaggctcccaggaagattttaaagaccttctacaaagtgccaagaaaaagagcattcacatcattttggacctcactcccaactataagggccagaatgcatggttcctccctcctcaggctgacattgtagccaccaaaatgaaggaggctctgagttcttggttgcaggacggtgtggatgggttccaagttcgggatgtgggaaagctggcgaatgcatccttgtacttggctgagtggcagaatatcaccaagaacttcagtgaggacaggcttttgattgcagggaccgcgtcctctgacctgcaacaaattgtcaacatacttgaatccaccagcgatctgctgctgaccagctcatacctgtcacagcccgttttcactggggagcatgcagaactcctagtgattaagtatttgaatgccactggcagccgctggtgcagctggagtgtgtcgcaggcaggactcctgacatcctttataccggctcagtttctccgactctaccagctgctgctcttcactctgccaggaactcctgttttcagctatggggatgagcttggccttcaggcagttgcccttcctggacagcctatggaggctccattcatgctgtggaatgagtctagcaactcccaaacctcaagtcctgtaagcctcaacatgacagtgaagggccaaaatgaagaccccggctccctcctcacccagttccggcgactgagtgacctccgtggtaaggagcgctctctgttacacggtgactttgatgcactgtcttcctcatctggcctcttctcctacgtccgccactgggaccagaatgagcgttacctggtggtgctcaacttccaggatgtgggcctgtcagccagggtaggagcctccaacctccctgctggcataagcctgccagccagtgctaaccttttgcttagtactgacagcacccggctaagccgtgaggagggcacctccctgagcctggaaaacctgagcctgaatccttatgagggcttgttgttacagttcccttttgtggcctgatccctctacacagaacctgccacccttctttcctctctcaggcctttggaattctggtctttctctccttattttgtttttgtttttaaacttttgcagattacatatgaattcttacactgggtgtttttgtcttcaaaataaaaaaaatcacccctgc

SEQ ID NO: 189 - DNA, 3624 bp, Homo sapiens
ctgcagtctctgtgcccgttcacctgtcccagttccttttgggtctgggtatctgtccattgataattgttggtgttccaaaagtaaaactttaaaatgttttaaaaaatggcattaatgtagtttaaaaccttatttatttacatttatttattatttattgtatatgtatatgatcacacaagcgccaagtgcatatgtagccagcagcagacgactgtcaaaagccagttctctcctcccatcaggtcctgaggactgaacttgtgttcttgggctttacccaccaagccatttgctggcccctaatttaaagtagtactcatttgctagtgtagctaaggggcttcagaagctgtttaaaggggatcgtgagttcgagagggcctaagctgcacactgaggcttcgtctcaaacacaaacaaatctagcttaatgggaaaagggacactgccttccactttcgcacacaccagcagacagaacgtaagtagggtggtagacctttggtctattgcaatagcagatgttgcagatcaatgaaaaacctgtagtactctcataagaaagagggtacaaaaggttgatgaaaatctgtctctttaggagagtgaatgggggcttcctgtatgctaggtaggcaatttaccacttagccacgcccccagcccctccctggggattctaggcaggggctctaccactgagccacctccctagtccttctagaagttattttgtgacactatccaaataagttattcaagtggtctctggaagtctctctgaagcttaggcgggtcttgaacttgtatcattagccacccacatagctgtaccaccacacctgggtagaactgatacttcagtgtgattttgaaaatgcccttgcttggcactggtagcacagcctttaatcccagcacagcctttaatccttgtgaggcagaagcagacgatctaggtgagaccctgtctgcctcgaaaatacagaaagtcaaaaacaaaacaaacaaaaacaaaaagggaaaaaagaaaagggaaattaatctagtggataccctaaaaagaatctaagattaatgagtgcatttttaagactttttttaagttttactcttgaatacaataattatcaatagacagggtatcttagactatctacagttggaaaactgtgttccaatatgaccctgaagtataagaaggagacacagccctagagtgcaagcaggggacaggacatgggcaagtagctacctcggaagcgacttattgatggacgggactcatggaaaaggttaggcaagcaggtgggctggatattccagcccaacctgtattacccagactgttgcaagatggcagacagatcaggaattcaaagtcacccctggattacatagtgagtttgaggctagcttggactagatgagactatctgtaaactcatccggagctcctttgctgagcggtagagtgcgagcccactgatgtatctgtctctctccctccaggtgtattctccagtgaatcctgtgcccaccatggcccctctcaactcctacatgtccttgaaccctcttagctctccctaccctcccggagggcttcaggcctcccctctgcctacaggacccctggcacccccagcccccaccgctcccctggggcccaccttcccaggcctgggcgcaggcagcggcaccggaggcagtgcttccgggtatggcgccccagggcccgggcttgtacacggaaaggaaatggccaaggggtaccggcggccactgactcatgccaaaccaccttattcctacatctctctcatcaccatggctatccagcaggcaccaggcaagatgctgaccctgagtgaaatctaccaatggatcatggacctcttcccgtactaccgggagaaccagcaacgttggcagaactccatccggcactcgctgtccttcaatgactgcttcgtcaaggtggcacgctccccagacaaaccgggcaaaggctcctactgggccttgcatcccagctctgggaacatgtttgagaacggctgctatctccgccgtcagaagcgcttcaagctggaggagaaggcaaagaaaggaaacagtgccacatccgccaccaggaatggaacagtggggtcagccacctctgccaccactacagctgccactgcagtcacttccccggctcagccccagcctacgccgccgtctgagcccgaggcccagagtggggaagatgtggggggtctggactgcgcctcgcctccttcatccgcaccctatttcactggcctggagctcccaggggaactgaagttggatgcgccctacaacttcaaccaccctttctctatcaacaacctgatgtcagaacagacatcaacaccttccaaactagatgtggggtttgggggctacggtgctgagagtggggaacctggggtctactaccagagcctctattcccgctctctgctcaatgcatcctagcggcgcaactgggagaaatgcggtgatgggggtttgctgtgacagatgaccggttcttcggccctgatctttctggttacactctgcttatccagttaattaacatcgtatttggtctattactgtgatatgacccattggctactgtggtaactgcatggactcttcggtgggcctagggttggggtattgtgaaggcagatgcatttgggagtgttacgaaggtggccatgtcggacataccgtgaaggcaattagactggtgtactataaaagctgcatgttaagtgagtgatccactgggtgcctgatggccgcgatgtcggaggacatattgtttggccctttggatgctgcgatggacatcttgaattgaccttttgaatgtgtgacagtcacaccgtgtcagccacatcttctttggcccattgtatccagggatcaccttttttttttttttttcttttttggcagacttcttggtacagcagataccaagttgaccaccatgtcttttttttgacattctggatgcatggaaggtcaccttattgacaaggtgacatctcgacatgctgttatgcaccaagttggtgaccacaggcctgctgtcaccatctccttggtggggttggatgagggtagaggtgagcagaccctgtgacttctctgaaggccatccccacccctgcccatgagaagggctagtgtgggtgtagggggttccctactgacgtcaagttcttgtatggggcttggggtactgcctgtgtttgaccattaaaacggcaccgtctccgtctcctggtgtcttttttcttggcggaccctgtgaggctcaaacacctaaatgtgtgttcccctgtgcccttcttcatatcccagggagctggtggcctctgtgggggaagggctgggggggggggggaggcagcaatgtgacctttggctctttgttgtccctgaccccaaggacagtttgttcatagatagaagcccccgcagtagtggggccagagcatccagggaggaggtggctttgcagtgaccaaggccatcgcccctcccccaccttgcagacacacacacaccccacacacacatacctgg

SEQ ID NO: 190 - DNA, 1182 bp, Homo sapiens
ggaagcttccccaccgcaaagcagctagacgtgcgggcagtctcagctgtccactgggagtcgccaacaccatctcttgggctccagggtcgcaatcactaccggggatctccagcaagtcttccggacccacgcgtagaggaggtggtgccaccgcgcgcaaacctggcgcggtcgtgacgtcaggactacgctagattggcaattggctggaggcatgtggcgcggacgggcactggcaggagtgattggatcagctcttaaggggcggggtctggaggcggagcatgctgccgagagcgttgaagtacggcgctccgcacagcttctcgacactcctgtctggaatcgctgtgttctaggtcagatcagacattctgtcacaatgcctgaaatcaatgccagcaatcttgatgaaaaacaggttcagcttctagcagagatgtgtattcttattgatgaaaatgacaataaaattggggctgacaccaagaaaaattgtcacctgaatgaaaacattgacaaaggactaatacatcgagctttcagtgtcttcttgtttaatactgaaaacaagctcctgttacagcagagatcggatgctaaaattacctttccaggttgtttcaccaatagttgctgtagtcatccattaaataaccccggggagctggaagaaaatgatgccatgggtgtcaaacgagcagcacagaagcgcttaaaggcggagctggggatacccttggaagaggttgatctaaatgaaatgaattatctaacaagaatttactacaaggcccaatctgatggtatctggggtgaacatgaaattgattacattttgtttctgaggaagaatgtaaccctgaatccggatcccaacgagattaaaagctattgctatgtatcaaaggaagaactcaaagaaattttgaagaaggaagccaggggcgaaattaagtttactccatggtttaagattattgcagacgcttttctctttaaatggtgggataacttaaaccatttgagtccttttgttgaccatgagaaaatacatagaatgtgaatgtgtaaatgatttgagatttttttctacctactaagaatggtttgattttgttttaaattgggctcccttgtatgacacatagatattttacaaccagaatttgttttgag

SEQ ID NO: 191 - DNA, 5036 bp, Homo sapiens
tgaacttgaaaactggtgtacaatcctgactttccacagtggggtctctctcttctcctggctccgtcaagttcacatctgtagggtccaacttggatggcatggtgtaggctgctggtacctgatgaacctgaatttggaagactgaagaaagttgtactgtagcctcctctgagccaaaagctgaaaagcaagtaaaccgttctcaactgggctaagtttttgaaaagctggcaaagggttgttgagtgcagattctgcaatgtctgactcagtgattcttcgcagcgtgaagaaatttggagaggagaatcatgctttcgaatcagatggatcacataacaatgataagaaatcaaggttacaagataagatgaaggagggagacattcgagttggcttctttgaactgtttcgattttcttcatcaaaagacatctggctgatgcttatgggaggcgtatgcgcattgctacatggaatggcccagccaggcatacttattatttttggtataatgacagatatttttattaaatatgacattgaaaggcaagaactcgagataccaggaaaagcgtgtgtgaataacaccattgtatggatcaacagctccttccaccagaacatgacaaacggaacagtctgtgggttggtggacattgaaagtgaaatgatcaaattctctggcatctacgcaggagtcggcatgaccgtacttatccttggatactttcaaataaggttatgggtcatcactggggctcgtcagataaggagaatgaggaaaatttacttccggagaataatgagaatggaaattgggtggttcgactgcacttctgtgggagagctgaattcaaggtttgctgatgatattgaaaaaatcaatgacgccattgccgaccagttggctcatttcctccagcgcatgtcgacggctatgtgtgggttacttttagggttctacaggggttggaaactaaccttggtgattcttgctgtcagccctctcattggcattggggcagccgtcataggtctgagtatagccaagttcacggagcttgagttgaaggcttatgccaaagcggggtctattgctgatgaagtcctctcatctattcgaacagtggccgcttttggtggtgagaacaaagaggttgaaaggtatgagaaaaatcttgtgtttgcccagcgctggggaatttggaaaggaatggtgatgggcttcttcactgggtacatgtggtgtctcattttcttctgttatgcactggccttctggtatggttccacacttgtcctagatgaagaagagtatacaccagggacactggtccagattttcctctgtgtcatattagcagctatgaatattggccatgcatcttcttgcttggaaatcttctccactgggtgttcagcagctaccaatatttttcaaacaatagacaggcaacctgtcattgactgcatgtcaggagacggctacaagctagaccgaatcaagggtgaaattgagttccacaatgtgaccttccattatccttctagaccggacgtgaagattttagataacctcagcatggtcataaagccaggggaaacgacggctctggtgggatccagtggggctgggaagagtacagcattacagctcattcagagattctatgacccctgtgaaggcatggtgactctggacggccatgacattcgctctcttaacatccggtggctgagagatcaaatcgggatcgtggaacaggagcccgttctgttctccaccactatcgcagaaaacatccgttttggcagagaagatgcaacaatggaagacatagtccaagctgccaaggatgctaatgcatacaacttcattatggccctgccgcagcaatttgacacccttgttggagaaggaggaggccagatgagtggtggtcagaagcaaagagtagccattgcccgagccctcatacggaatcccaagatcttgcttctggatatggctacctcagcactggacaatgagagtgaagctagagtacaagaagcattgaataagatccaacatgggcatacaatcatctcagttgcccatcgcctgtcaacagtcagagctgcagatgtgatcattgggtttgagcatggagtagctgtggaaagaggcacccatgaagagctgctagaaagaaaaggtgtctacttcatgcttgtgaccctgcaaagccaaggagataatgctcacaaagaaacgagcataatggggaaagatgcgacggaaggtggcacccttgagaggaccttttccagaggcagctatcgggatagtttaagagcttcgatccggcaacgctccaagtctcagctgtctcttctgacacatgaccctccactggctgttgctgatcacaaatcctcttacaaagacagcaaggacaatgacgtgcttgtggaagaagttgaacctgccccagttaggaggattctaaaatacaacattccagaatggcactacattctggtaggatctttgagtgcagccattaatggggcagtcacacccatctactcccttttattcagccagctccttgggactttttcactcctcgataaagaacaacaaaggtcagagattcacagcatgtgtctgttctttgtcatcctgggctgtgtatccattttcacacaatttctgcagggttacacttttgccaaatccggagagctcctcacaaagaggctgcggaaatttggtttcaaggcaatgttaggacaagatatcggctggttcgatgacctcagaaataatcctggagtactgacgactaggcttgctacagatgcttcccaagttcaaggggctactggctctcaagttggaatgatggtcaattccttcactaacatcattgcggccttgctgattgccttcttctttagctggaagctcagtctgattataacgatcttcttcccctttctggctttatcgggagctgtacagacaaaaatgttgacgggattcgcttctcaagacaagcaagctctggagaaggctggtcagatcaccagcgaagccctcagcaatatccgcacagttgctgggattggagtggagggaagatttattaaagcatttgaggttgagctccagacatcatacaagactgctgtcaggaaggcgaatatctatggactctgctttgccttttcccaggggatagcatttcttgcaaattccgctgcctatagatatggaggttacttaatagcctacgaaggtctgggcttcagccacgttttcagggtggtctcttcagttgcattgagtgcaacagccgttggaagaacattctcttatactccgagctatgccaaagctaaaatatcagctgcacgcttttttcaactgctagatcggaaacctccaattaatgtgtacagtgaagcaggtgaaaaatgggacaacttccaagggaagattgattttattgactgtaaatttacgtatccttctcgacccgatattcaagttctgaatggtctctcagtatctgttaatcctgggcagacgctggcatttgttggaagcagtgggtgtggcaaaagcaccagcattcagctgttggaacggttctatgatcccgatcagggaactgtgatgatagatggtcatgacagcaaaaaagtcaacattcagttcctccgttccaacatcgggattgtctcccaggagccagtgctgtttgactgtagcataatggacaacatcaagtacggggacaacactaaagagatctccgtggagagagccatagctgctgcaaagcaggctcagctgcatgacttcgtcatgtcgctcccagagaaatatgaaactaatgttgggatccagggctctcagctctctcgtggagagaaacaacgcattgctattgctcgggccattgtgcgagatcctaaaatcttactactggatgaagctacgtctgccctagacacagaaagtgaaaagacagtgcagactgctctggacaaagccagagagggtcggacctgcattgtcattgctcatcgtttgtccaccatccagaactcagatatcattgctgtcgtgtcacaaggagtggtgattgaaaaagggacccatgagaaactgatggcccagaagggagcctactacaagctggtcatcactggagcccccatcagttgacctgactggagacttcacacagataatgatgtgctgagtacaggagggctgtgggtttttgtagtcatatagagaattattaatgctttacagacagaagtatccactgggatccaaagtaattttgagtgactttcagtaataatttcagtttgaaatgtctatgtagaaaggagagagcccagagtcagcatgagtcaaagttcaaagtccaaggtcaagtagctgcttatctgccggccagtgctgctctgggtagaaactggtcactgtctccatcgaggacgccgcggtgagagcaaggagtcctccttcaggacagagggttatctcttgcatctgggaaagctccctgcgcactgagcctgctctgtaatctgcactcaactgtttgagccagttcaaggccaagagctaaggacccaaggctactggtatttcttaactaagtttagtttgtttactataaggaagcaaatttatttacctttaactcctgtgagtagggtggggagccctttcctattctggcatctcccaggctcagggaggccaaggtgacaaaaggagaagtagaggtcgctggtcaggtgtgttgattgtaccgaaggctcagggtattggtgtcactgtacactacagtggatctgccagtgtgaagcaggggctctctaccaggacttcgacttttcattccctgccaccatgtcacctgatgtcccttactcttaggaaattctatgcatggaatggaaatgcatccgaatcttaagttgttacataaaaaaatctagtaaaacatagtagg

SEQ ID NO: 192 - DNA, 2381 bp, Homo sapiens
atgcttcgcggcgcgcgcagccacctctcggcctcggtagccctcgccgcggtcctggctgcggcgctgctctcgtcgttcgcgcgctgctctctcccggggcgcggcgacccggtggcttcggtgcttagcccctacttcggcacgaagacacgctacgaagatgtcaacccctggctgctgggcgacccggtggcgccgcgacgggacccggagctgctggcggggacttgcaccccggtgcagctggtcgccctcatccgtcacggcacccgctaccctacgaccaagcagatccgcaagctgaggcagctgcaggggctgctgcagacccgcgagtccgtggatggcgggagccgagtggccgccgctctggaccaatggccgctgtggtacgatgactggatggacgggcagctggtggaaaaggggcggcaggacatgcgacagctggccctgcgtctggccgccctcttccctgacctcttctgccgggagaactacggccgcctgcggctgatcaccagctccaagcaccgctgtgtggacagcagcgccgccttcctccaagggttgtggcaacattaccacccaggattgccacctcccgacgtctcagacatggagtgtgaccctccgagagttaatgataagctaatgaggttcttcgatcactgtgagaagtttttaaccgaagtcgaaagaaacgccacggctctttatcatgtggaagccttcaaaaccgggccagaaatgcagacagttttaaagaaagttgcagccactttgcaagtgccagtgaacaatttaaatgcagacttaattcaggtagcctttttcacctgttcgtttgacctggcaattcaaggtgtccattctccctggtgcgatgtgtttgacgtagatgatgcgaaggttctggaatacttaaatgatctgaaacagtactggaaacgaagttatggctatgccattaacagccggtccagctgcaacctgtttcaggacatttttctacacctggacaaagcagttgagcagaagcaaaggtctcagccggtctcttcttcagtcatcctccagtttggtcatgcggagaccctcctacccctgctctcgctcatgggctacttcaaggacaaggagcccctgacagcatacaattttgaggagcaggtgcatcgcgagttccgaagtggtcacatcgtaccatatgcttcaaacctaatatttgtgctttaccattgtgaagacgcacagacccctcaagaaaaattccagatacaaatgctgctgaatgaaaaggtgttacccttagctcactcgcagaaaactgttgccttgtatgaggatctgaagaaccactaccaggacattcttcagagctgtcaaactagtaaagaatgtaacctacccaaggtgaacatcacgtccgacgagctctgaggactcatcagtgctctgctgagggcgcttgttgccaataggtagccactctaaaggcagcaacaggaggatctctgtgagctcaaggccaacctgttctacatagtgagttccaggccagccaaggctgcgtagagaaataaagtttggtccttttgtcttttcacagaaaatgatagtttcttttagaatctggacatacgggtaagacatgactctccctggagcagctctcttcagaaaaactaattcagcaaaacagctgtccctcccagtgtttgcagagctgaaattttcctaatgacctaagaaaatgctgatgtagaatggtattagaaaataacacttcaaaagtgttggataccaaagcacagtggcagctgggtgagccgcagtgagtgactgagatggggacttgagtgatcatgttgggttctttccttctccttcacgaaggacacaaagaaggaagtctaataacgtatccatccagacaggaaatcaactcgatattaagaaccaggctgaagtaaaactgaaagtgtgggctatttttgttgatgttatttacaaaaagatttaaacactgtcagtaattgcctttaacctccaagtaggtcttgcagaaccacctccatccctcggacctgtttgaggcgcgcagttataatggggcccagcctggtacagagccgacttccttgactgttgcctggttatctttcgttccatcatggctcccctttttatatcttgatattacataaagtttatcttttggtggcttggatttttttttaaataaagacttatctgcctaatttaattgtagagattcgaacctgattcaaagaaattttgagttctttcaaataccataaaaatgtttgctacaataaataaataaaattcttgtggctttactaccaaaaaaa

SEQ ID NO: 193 - DNA, 669 bp, Homo sapiens
ccaagatgaaggacatgcggatggataagtcggagctcgggtgcctgcgcgccattgtgctgttcaatccagatgccaagggtttgtccaacccctcggaggtggagtctcttcgagagaaggtttatgccaccctcgagccctataccaagcagaagtatccggaacagcctggcaggtttgccaagcttctgctgcgcctcccagctctgcgctccattggattgaaatgcctggaacacctcttcttcttcaagctcattggggatacccccattgacaccttcctcatggagatgttggagacccctctgcagatcacctgaaactcctcggcagtagcttcctcacccagagtgacccctgggctggtgtgtgtgtcgccctacccctgcacactgtcctctcccactctgacttcccttcctgtccccaaaatgtgatgcttgtcccgaataactacaacctttctacacatgagacttttctaggtggagttttgtatggttgttaaaggtgacccttctttgctacttaaggggctgagtctggcagttcttggaagagtagccaagcctctgtacatataattatcttggtttaaattattttttcacttgccatggaaagcaaacaaatggaaaagaaaataataaatacgatactggc

SEQ ID NO: 194 - DNA, 4969 bp, Homo sapiens
aagcttacacagaccctacaacaagacttggtgaaaccgtgtgcccaagagcacaagtgcggttccgtgcggtttagtgcggtttacacgacaggaggtcgtgtaaacagctcctgctgctttctctttcataaagacacaagtgatacagtctcgcctctcgttcctgttggacgcaggcgtctgtagaagccaatcagcagcacagaagttccaaagtacgagtcaacagaaacacaacccacattcatgtttttcacagtccctgggcgtgaggatgttacctcctgcctatttgctccaactactggcaggcaccatggtcctgacccagactagtaagtgcggggaggggtcgggaaagaaaagactctgagaggtgaaagggggtggggtgtggggccaggggtggtggcgggggggggcagcaccctagggtctgtcaccctatcccagtccctcctctgccagcacctgagatcctgagcctagaggagctcagggtctcactgcgcgccgcccccaggctcacactcgctgcggtatttctacaccgccctgtcccggcccggcctcggggagcccaggttcattgtcgttggctacgtggacgacacgcagttcgtgcgctatgacagcgatgtggagaatccgaggatggagccacgggcgcggtggatggagcaggaggagccggcatattgggagcgggagactcggaaagccagggacaccgggaggaacttcaaagtgaatctgaggaccctgctccgctactacaatcagagtgacgacggttgagttgactgccggagggatcacaaacaggatccctccatgttccctgagactggcctgggtcatcttgaacccggccgggtcaaagtatcatccaaacgcctacctagaaatcccagacaagaaagccccggcagagttctgcttaggtttcggttgcacttttgtttctaaaaattctggcatatctactgacagcgggcaagatggccacgagggggcgctgaaccggcgtttcccctttcagaatctcacacgctgcagtggatgtacggctgcgacgtggggcccgatgggcacctgctccgcggttattgtcaggaggcttatgacggccgggattatatctccttgaacgaggacctgcgctcctggaccgcgactgacatggcctcacaggcctctaagatcaagtcagaggaagttggtgaggcccatcaccagagggcctacctgcaaggtccttgcgtggagtggctccacacatacctacatctgggaaaggagacgctgctgcgctcaggtgccctggagacccctccttagttttcctctgggggtttgggggggaaaggcttggggtatagctcaggggcagaacgctgtccagcagccacagtgctgaagagaagggagaaagactcccaaggctgcttttcctctgtcaggaagactaagccttaatcaagcagatcagcttgacaatgtccctggacccattaggggcattttcctcaggcctccctctatgccctactcagtgtctctgagagtcagactccagcgttgttctcagtctctaggccctcacccaggctcaggacgagaaggcccatgcccaggagtcctggccagagaccctggagtctcctgccccatagttgtcagactcacatcctaaagcagacaaaggaacagcgccgggaggtgcatgtgctcctgctggtgtctggattgtggacaccctaatcccatcccaggtctcctgaccatcccaggatggtcacatggacaatactgtgtccctggaagaaagctagatgcctcagtcttacaagtctctccctcagaccccccaaaggcacatgtgacccttcaccccagacctgaaggtgatgtcaccctgaggtgctgggccctgggcttctaccctgctgacatcaccttgacctggcaattgaatggggaggacctgacccaggacatggagcttgtggagaccaggcctgcaggggatggaaccttccagaagtgggcagctgtggtagtgccttctggggaggagctaaagtacacatgccatgtggagcatgagggactgcctgaacctctcgccctgagatggggtaaggagggtgtgggtgcagatctggggtcagggaatgtggagccttctgcagaccctgagctggtcagggatgagaatcatgactcttccttcccagagccttctccattcaccgactccagcatgccagtgattgttgtccttggagctgtggccatcattggagctgtggccatcattggagctgtggccatcattggagctgttgtgaggaggaggaagagaaacacaggtaggaaagggcagggtctgactcttctctcagcctctttgaagtgtgctgtgctcattaaggggaaacacagccacaccctgcattgcctagtctctaacctggactgctgtcagtgctggaaacttcctagggctggtgtttccctgacttctcatgactttccttctcgacaggtgaaaaaggcagctatgctcatgttctaggtaggtgtgggtggggttggccgtggagtggggtgcacccttgtacccagaggcccttgggatgggagctggcgcttatggaggagttctgccaggcccataattccctcttgccatattggtcacctgaatatacctgcatttataattcctctactcaggcagcaaggctttccagatctctgactggcctcagaaggcatgaaaaggtatgaaaacccatgggggcctgggatcggacctgaggcaaagggaagaacagggccttgtgggatgatgtcacaggtgaggcaggtacaagatagaaggaggcctgttattggatgagaaagaaggatgggtgggagacaagtttgaaggaagaagaggatactggaacagagagagaggaggagaggagggagagggagagaagccttggcaggcaatatatcaggtgacgttaagattctcctctgtgtacttagaggttgttattaatgttcctaagggatggatggtaccgggctttgtatgtttaactcggcaattatatcttatcaattggctctaagattattgttggtgtgttcttttatgtgatggtttgagtgtaggaaagtgtgcagtgacaggagacgatgggccagcacagagttgggatgtgtttccacccaagatatctaacagatatcttggggcactgcagtgcagacctagcggggtaaaagacaactatactttttttactttttatatttttacaacaacagggtctctcagatttagacatttgaatgactgagcatctttacaatgacttcaggactcttgttctattgcgttcagacagttgcctcgtggggctgagcgacaagttctgactaaacatctgagggagctgcttcccctgaggacaatgtgaagaactggcaatcccagaccttcttgcctccctggacacctgacttcacaacagaaaataatctgactctgggctgggtgtttcctattgcttttatctgcactgagtggaaatgcgatttccaacagtgtaacgcagcaccgttgtgtggtggtagtgacattgcacacaggtttgtgagctgggggtgtgatgtgcttttcttactgtaggcagaacaagctagaagtccaccattcctcttatggtcattgttttaaaacaaaacaaatgctggagagatggctcagtgttaagagcactgacttctcttacagaggtcctggttcaaatcccagcaaccacatggtggctcacaaccatatgtaatgagatctgatgctctcttctgatgtgtctgaacacagctatatatgataaataaatctaaaaaatattttttaaatggccagacagatggcatgagtagggcacaccatggtcaactctgctgtctgtgtatctctagacatccagtgctctttagagtccacacaaggtcattaaaaggactggggtggatggtgactggagagatagctcagtggttaagagtgtttgctgcttcatgggtggtggtggtggcacaagcctttaatccaaacactcaggaggcagaggcaggtggatctctgagttcaaggccagcctggcctataaggcaagttccaagatagccaaggatacacagagaaaccctgtttgaaaaaacccaagcctagacctggagagttggctcaatggttaagagcactgactgcttttccagaggtcctgagttcaaggcccagcaaaggcacatggtggctcacaaccatctgtaatgggatctgatgcacttttctggtgtgtctaaagcgacatggtaactcgctgtctgtaactagtaggcaaacagttcatatctcacacagacatgaatgcagatagagcaccaacacatataaaattaaatctttaaaaaatgaaaggtctgggggctggatgaatggtgtttgtctttgaaatgtctgacagtgctgtgactcacagcctgcatagcagctcctattgcctggtgttcaccatctgtcttggttataaaaaggtttcgtaatgtgaaacccttcaaatgagctggtgcccttctcaccagtttgcatcttgacaggattcctgaagggcttatattctgggccttcccattgtggaggattaggttttacacaacgtatcctctctagcattgcaatttccctgagccttaaaatcccttcatcgacgctgagccaagggatatctggcatctgcaactccttttccgtaggccgtcatttgatgaacgcttcagccaaccattcaaacaaactttctgacacttttttttaactgtgtggccttccatattaaacccagaatctccactcaaagggcccatgtcaataaactcagcctgatctatt

SEQ ID NO: 195 - DNA, 4969 bp, Homo sapiens; identical to SEQ ID NO: 194

SEQ ID NO: 196 - DNA, 1272 bp, Homo sapiens
gaattcgactgctggaaccaacgtcctctcttaccctccaccttcttctgccacctctaccacggtcaccatgtcgcaagcccggcctgccactgtgctgggtgccatggagatgggtcgccgcatggatgtgacctccagctccgcgtcggtgcgcgccttcctgcagcgcggccacacggagatagacaccgccttcgtgtatgcgaacggtcagtctgagaccatcctaggagacctggggctcggactgggccgcagcggctgcaaagtaaaaattgccaccaaggctgccccaatgtttgggaagacactgaagccagccgatgttcggttccagctggagacgtcactgaagaggctgcagtgtccccgggtggacctcttctatttacactttccagaccacggcactcctatagaggagaccctgcaggcctgccaccagctgcatcaggagggcaagtttgtggagcttggtctgtccaactatgtctcctgggaagtggctgagatttgtaccctctgcaagaaaaatggctggatcatgccaactgtgtaccagggcatgtacaacgccatcaccaggcaggtggagactgagctcttcccctgcctcagacacttcggactaaggttctacgccttcaaccctttggctgggggcctgctgactggcagatataaataccaggataaggatgggaagaatcctgagagccgcttctttgggaatccattttctcaactgtacatggaccgctactggaaggaggaacacttcaatggcatcgccttggtggagaaggctctgaagactacctatggccccactgcccccagtatgatctcagctgccgtacggtggatgtaccatcactcacagctcaagggcacccaaggggatgcagtcattctgggcatgtccagtctggaacaactggagcagaacttggccttggtcgaggaagggcctctggagccagctgttgtggatgcctttgaccaagcctggaacctagttgcccacgagtgtcccaactatttccgctaagatacatctgccttggggatggcgcagcttactgcctgccccgccttgtcctgggctcgatctgatctggttctttcctttttagacaggtcactgtctttttcttccctgctttctatacagccagttgctttcaaagtgagagctggctgagccccaatacctcctgctgaataaaactgttccctgtcacagcctgggctacaactggcggccga

SEQ ID NO: 197 - DNA, 2426 bp, Homo sapiens
catcagtgctgttctctctactggtgcttcgggaactctagaactccttcctgagagggaagcaaaccaagctattgccagagagagttccataagagctctgaatatgcattggctgtggaaaattccaagactttgcaccttctggggcactgagatgttccaccgttctttccatatgaatatcaagaaactaatgcccatacagtggggccaccaagaagtccctgccaagttcaacttcgctagtgatgtgatagatcactgggccagcctggagaaggctggcaagagatctccaggtccagccctatggtggatgaatggcagtggggaagaactaaagtggaacttcagagaactgagtgaaatcagtaaacagacggccaatgttctcaccggggcctgtggcctgcagcgtggggaccgtgtagcagtagtgcttcctcgagtcccagagtggtggctggtgaccctcggctgcatgcgttctggtcttgttttcatgcctggaaccacccagatgaaatccacagacatactctacaggctgcaatcatccaaggccagggccattgtggctggggatgaagtggttcaggaagtggatgctgtggcccctgactgctcttttctgaaaatcaagttgctggtgtctgaaaaaaatcgagaaggatggctaaacttcaaggcactgctaaaggatgcatcccccattcatcagtgtgtggagactgtaagccaagaatcagctgccatctatttcactagcgggaccagtggccctcccaagatggcagagcactcccactgcagcctgggcctcaaggccaagatggatgctggctggacaggactgggaccttctgacacaatgtggaccatctcagacacaggctggatattaaacattttagggtcatttctggaaccttgggtattgggaacgtgcatatttgtccatcttttgccaaagtttgatccacaaactgttctaaaggtgctttccagctaccccatcaataccctgctgggtgcccccctcatttaccggatgttgctacaacaggatctttccagttacaagttcccacatctgcatagctgcttcagtggaggagagaccctcctcccggagactctggagagttggaaagccaagacaggactggaaatccgagaaatctatggccagacagaaacgggaattacctgcagagtttctaggacaatgaaagtcaaaccaggctacctgggaacagccattgtcccttatgatgtccaggtcatagatgagcagggcaatgtcctgccccctggcaaggaaggagacatggctctcagggtgaagcccatcaggcctataggcatgttctctggatatgtggacaatcccaagaagacacaggctaatattcgaggagacttttggcttctgggagaccggggaattaaggatacagaagggtatttccacttcatgggacggacagacgatatcattaattccagtgggtaccgaattggaccttccgaggtggagaatgcactgatggaacatcctgccgtggttgaaacagctgtgatcagcagcccagaccctatcagaagagaggtggtgaaggcatttgtggttctagcccctgagttcctgtcccatgaccaagaccagctcaccaaggttcttcaggaacacgtgaagtcagtgacagcaccctacaagtaccccaggaaggtggagtttgtcttagacctgcccaagaccatcacaggaaaaattgagcgagctaaacttcgagccaaggaatggaaaacatcaggataagcccaggcccagtgagactcccaaggctcttgctctgtctttcccaatccttttcttatgactccttagtcttcctatagcaatatgaaattattcatgtagaggcatgtatgtgatttaggtctttgcttggttattgacacagaacaatgacacgtttcatgctaaaagaagaaagaaagagggaataagaggtttgaagtcagaaaaggctaaaacagcaagggaaagaaattgccaattcaagtggtcaggaaggggtagagagaaggggaaagcagaatgaggagagagagagatgagaaggaactggagagaaatagaaaaagggttgtgtagaaggacactagtgtcttcgccaagttgtgtcaatccttagggacatcatgcccaaaggagaaggaaataccacttacagagcatgcccaaggcactgttatacacttgtcatgagtcctatacaggtcatgagccatcttacttcatctgggtgacatctgcaggctcatcttctgcaccccaaaatgtaccacttcctgtagctcacattttttgttctagctttatttccttgaattaataataaaatcacttcaaaatc

SEQ ID NO: 198 - DNA, 1544 bp, Homo sapiens
  misc_feature (1031)..(1031): n is a, c, g, or t
atcgcggaaattaccgatgcctgcgcagctccttccgctcagctccgcgtccgagcctcctggaacgatatttggagttcttaaaagatggcagacattgacaacaaagaacagtctgaacttgatcaagatttggaagatgttgaagaagtagaagaagaagaaacgggtgaagaaacaaaaatcaaagcacgtcagctaactgttcagatgatgcaaaatcctcagattcttgcagctcttcaggaaagacttgatggtctggtagacacaccaacaggatacattgaaagcttgcctaaggtagtcaaaagacgggtgaatgctctcaagaatcttcaagttaaatgtgcacagatagaagccaaattctatgaggaagttcatgaccttgagagaaagtatgctgttctctatcagcctctgtttgataagcgatttgagatcattaatgcaatttatgaacctacagaagaagaatgtgaatggaaaccagatgaggaagatgaagtttcggaggagctgaaagaaaaggccaagattgaagatgagaaaaaggatgaagaaaaagaagaccctaaaggaattcctgagttttggttgacagtttttaagaatgatttgctcagtgatatggttcaggaacatgacgaacctattctgaagcacttgaaagatattaaagtgaagttttcggacgctggccagcctatgagttttatcttagaatttcactttgaacccaacgaatatttcacaaatgaagtgttaacaaagacttacaggatgaggtcagaaccagatgattctgatcccttttcttttgatggaccagaaattatgggttgtacagggtgccagatagattggaaaaaaggaaagaatgttactttgaaaaccattaagaagaagcagaaacacaagggccgtgggacagttcgtactgtgactaaaacagtttccaagacttctttctttaacttttttgctcctcctgaagttcctgagaatggagatctggatgacgatgntgaggcaatactggctgcagactttgaaattggtcactttttacgtgagcgtataatcccaagatcagtgttatacttcactggagaagctattgaggacgatgacgatgactatgatgaagaaggtgaagaagctgatgaggaaggggaagaagaaggagatgaggaaaacgatccagactatgacccaaagaaggatcaaaacccagccgagtgcaagcagcagtgagcagtgactggccttgaggacggcctccctgtaatagcctaaacatgactcacttacttacagccttatggttttgtattttcttgatagaatcagtaagtttctaagggaaaggaaattgatattttgcagaccaatttgttctaaccagcatcccaactctagctctgtagccacgttaccgagtccagccctttactgcatgctcaggtcgctgcagtctggttctcctgagagatttcatcatgtagctattggtacattatgaaaccactgtgaacaat

SEQ ID NO: 199 - DNA, 1544 bp, Homo sapiens; identical to SEQ ID NO: 198
  misc_feature (1031)..(1031): n is a, c, g, or t

SEQ ID NO: 200 - DNA, 3770 bp, Homo sapiens
cgcggaactgtgctcaggacctgagctgagaggattcgcccagtgtcagcggcgcgagctggtgaggagaggacgaggatactaggctgaaaaacactccacctccacttgccaatattgtttcagaatgtcaagtactgcgtcctaccggatcttcaattttgcaaggaatcgtattgctgtgttacgagggggtagacgcttgtactccagggcagccacgagtaggaatcaagtgaaatggaggctcttttctcccgcatcattggccgtgaacgacagttctccacatggtggctttgctctgcggaaagcttacagacacacatcaaccgaggaagaggatttccacttgcagctcagccccgaacaggtcagtgacctgctccgagctggcgagtcatcccacaaggttctggatttcaacagcggagttccaaattcagtgttaaggtttgagagcaaccagttggcggccaattccccagtggaagaccgacaaggtgtggcttcctgcgtgcagacgagggggacgatgtttggtatttttgatgggcatggtggccatgcgtgtgcacaggcggtgagcgagaggcttttctattacatggcggtgtccctcatgtcccataagaccttggagcagatggaggaagccatggagaacatgaagcctttgctgcccatcctgcagtggctcaagcaccccggagacagtatttataaagatatcacatcggttcatctggaccacctccgagtctattggcaggaactccttgacctacatatggaaacgggactaagcactgaagaggcattgatgtactccttccagagactggactccgacatctcgctagaaattcaggctcctctggaagatgaggtaacgaagaacttatccctccaggttgctttttctggggcgacagcctgcatggcccacgtcgacggagttcacctgcacatagcaaatgctggcgactgccgagctatcctgggtgtccagggagacaatggagcgtggtcatgtttacctcttacctgtgaccacaatgcctggaatgaggcagagctgtcccggcttaagagagaacaccccgagtctgaggacaggacactcatcatagatgacaggctgctgggtgtcctcctaccctgcagggccttcggggacgtccagctaaaatggagtaaagagttgcagcggaacgtcctagagaggggatttgataccgaggccctcaacatctaccagtttaccccgccccactaccacactccaccctacctgactgctaagcctgaggtcacataccacaggcttaggccccaagataagttcctcgtgctggcctcagatggcctctgggacatgctggacaatgaggatgtggtaaggctggtggtggggcacctgtccaaggtcggtcaccagaagccagccctggatcaaagaccagccaacctgggccacatgcagagtctgctgctgcagaggaaagccagcggactccatgcagctgaccagaatgcagccacacatctgatcagacatgccatcgggagcaacgagtatggggaaatggagccagagcgtctggctgccatgttgacgctgccagaggatgtggccaggatgtaccgggatgacatcactgtcatggtggtgttttttaactcagaatcaattgatacctattttaaggagggttaagagtctcaccctgttgccaaggctaactcgaatgccctttatttagaacatttccactcattccttagtgagcaatccaaaccttagtaaagaacaggcagacataggttgctgagtaattaacgaaaggtagggaaaaccatccttagtgcaaaaaaacaaaaaacaaaaaacaaaaaacaaaaaaacaaacaaacaaaaaaagacattaggagcgaattttgtcctgtgtgttggtcagctcttctatgcagcagacaaaataaagactaaaattggcttaggctcatgtagcccatgtcctttataaagactgttaaattgtgtcatcctgtgcttttaaaggataaatttaatcatgagtctaagaataaagaacttcaggatcttctgagacccagttgcaaattttatagaggtgatccttctgaactctcgttatgagcaacttcttggctctagttttttgtttgttttttttttaaactagggaagcctaggtttacaaagcaatcttcagggcacttttctatgttgtgttctaacttccctctgtgtgtgtgtgtgtgtgtgtgtgtgtgtgtgtgtgtgtgtgtgtttatatgaaacgactgtgataatactctggatagtctgtgctgtttgtgttttaatgctggttaaatttattttaaaactgaatctcaagcttgtaagcaggactgccagaagcatgtttgggacctcagctgaggatgagaggaactaggcctctggatcagctgaatttaattgtgcagctatcgttcccctccgttgagcctcacttctgaacctttgagccgcctggggaggtgatttctgtctaatccctaactcctggcatttttgcttagtcaacggttccccctaggcttagccacgggttattcataattttaggttccttttgattatagcctccaaacattctgattccctgtgacacaatcctacctctgctattctgcctggcctcatcctgatgttactggaaaaccttacctgttctttctatcatccaaaggttggaagaaagatgacgtggtaattgaggacatttaggcaggacggactttttcagtggtttgtggacttgagagttcagcctggatctagagaagtgaaagtaaggtcttatgaagagccaggagccgaggctttctctctgcatcttggaagggaggagggagacttatcagatgggccacctgcccctgcctgttgagttgccgtggctacgccccgaagactagaccatatttagtgtgatagttgggtgaaagttaaaatgcatctggctatagtcctcatgggtcgttggtgtctgcttaaaaactaatccatacaaatcggtttcaggggatacgtttcctcttctcttggttggctgtggcattgaactgcaggaaatgtgtccctaaatggaaacacactttatttttggccattttaatttcctgtcccttgtcagtgccgtaggcaaagctctttagttgatcctttctgttgcttatccactgtgccatccacacactaggtttggcccccttggctttgcaggttagacgttctgccaagttcagactgggttagcaaaactggttagctcagtgggtaaaggctgccagtctcaaaatcccgagttccatccgtgggacttgcgtgatgaaaggagttgaaagatgtcactgacctccacatgtgcactgaggcacatgaactcacacacacaaaaaagaaatcagagccaggcagtgatggtgcatgcctttaatgccagcactcaggaggctgaggcaggtgaatctcttgagtttgaggtcagcctggtctacagagttccaggacagccaggacaatacagagaaaccctgccttgacctccagtccccaccagaaaaaacaaacaaacaaacaaacaaacaaacaaacaaaaaaaccaaaatgagaatcgttttttgtacatttcccagtgtacctgtttagtgataatggttttatgtttaaaaaaaaaaaaaaaaaaaaaaaa

SEQ ID NO: 201 - DNA, 2625 bp, Homo sapiens; identical to SEQ ID NO: 3

SEQ ID NO: 202 - DNA, 2625 bp, Homo sapiens; identical to SEQ ID NO: 3

SEQ ID NO: 203 - DNA, 1068 bp, Homo sapiens
gtgtcctcatcagggtcacaaacctgtgaggaaaccctgaagacttgctctgtgatagcctgcggcagagacgggagagatgggcccaaaggggagaagggagaaccaggtcaagggctcaggggcttgcagggccctccagggaaactggggcctccaggaagtgtaggagcccctggaagtcaaggaccaaaaggccaaaaaggggatcgtggagacagcagagccattgaggtgaagctggcaaatatggaggcagagataaacaccctgaagtcaaaactggagctaaccaacaagttgcatgccttctccatgggtaaaaagtctgggaagaagttctttgtgaccaaccatgaaaggatgcccttttccaaagtcaaggccctgtgctcagagctccgaggcactgtggctatccccaggaatgctgaggagaacaaggccatccaagaagtggctaaaacctctgccttcctaggcatcacggacgaggtgactgaaggccaattcatgtatgtgacaggggggaggctcacctacagcaactggaaaaaggatgagcccaatgaccatggctctggggaagactgtgtcactatagtagacaacggtctgtggaatgacatctcctgccaagcttcccacacggctgtctgcgagttcccagcctgaggaaaccagtgcctccatcgtctccttggctctcagtcgcttccaaagaaaattcagttactggtttctcaagtttagtgttaagtgattcttttgatgggagagaatgtatttgcttgtggcatgaggacacgaatagaagctgaccgggaggcaccaggatctggttgagcacggagcaaaggtcacatccattttgctaggaacacagcaagaagtcaactatggaaaacctacaataaatatcccctgcccttttcaccagaggaccaaaggtggtccttatctgtgccagagtggcagctgatctcagccataaaagcacccaattccctttctccatgaattgtcactaagtggtgtcaaacgtgcctgtttgaagtcatcctcagt

SEQ ID NO: 204 - DNA, 7866 bp, Homo sapiens
atatccgctgcggagcgaacggcgtgaggcaggggccgcggcggcgcatctttttcctcagcagccctcagcgcggcgacccacgcccctcacccctaggaaccgaaaatggatccaagtggggtcaaagtgctggaaacagccgaggacatccaggagagacgacagcaggttctggatcggtaccaccgcttcaaggagctctctaccttgcggcggcagaaactggaggattcctatcgcttccagttttttcagagagatgctgaggagctggagaagtggattcaggagaagcttcaagttgcctctgatgagaactacaaagaccccaccaacttgcagggaaagctccagaaacaccaagcctttgaagctgaagtacaggccaactcaggagccattgtgaagctggatgagacaggaaacttgatgatttctgaagggcactttgcatctgagaccatccggacacgtttaatggagctgcaccgccagtgggagttgcttttggagaagatgcgggagaaaggaatcaaactgctgcaggcacagaagctggtgcagtatttgcgggagtgtgaggatgtaatggactggatcaatgacaaggaagcaattgtgacatctgaggagctgggccaggatttggagcatgtagaggtactacagaagaagtttgaagagtttcaaactgatctggctgctcatgaagaaagagttaatgaagtaaaccagtttgctgccaaacttatccaggagcagcacccggaagaggagctgatcaagaccaagcaggaggaggtgaatgcagcttggcagcgactgaaaggcctggctcttcaaaggcaggggaagctctttggtgctgccgaggttcagcgctttaacagggatgtagatgagaccattggttggattaaggagaaagagcagttaatggcctctgatgactttggcagagacttagcaagtgttcaagctctgcttcggaagcatgagggtctggagagagatcttgctgctctagaggacaaggtgaaagccctgtgtgccgaggctgaccgcctgcaacagtcacaccctctgagtgccaaccagatccaggtgaagcgagaggaactaattaccaactgggagcagatccgaactctggccgcagagagacatgcacggcttgatgactcatacaggcttcagcgctttcttgctgacttccgtgacctcacgagctgggtgactgaaatgaaagccctcatcaatgcagatgaactggccaatgacgtggctggtgctgaggccctgctggacaggcatcaagagcacaagggtgaaatcgatgctcatgaagatagctttaagtctgcagatgagtctgggcaggccctactcgctgctggtcactatgcctcagatgaagtgagggagaagctgagcatcctctctgaggagagagctgccctgctggagctgtgggagcttcggaggcagcagtatgagcagtgcatggacttgcagctcttctaccgagacactgagcaggtggacaactggatgagcaaacaggaggcattcctgctaaatgaagatttgggtgactccttagacagtgtggaagctcttttgaagaagcatgaggactttgagaaatctctcagtgcccaggaagaaaaaatcacagcacttgatgagtttgcaaccaagcttattcagaacaaccactacgcaatggaagatgtagccactcgacgagatgctctcctgagccgccgcaatgccctccatgagcgagccatgcatcgccgggcacagctggccgattccttccacctgcagcagttcttccgcgattccgatgagctcaaaagttgggtcaatgagaagatgaaaacggccactgatgaagcttacaaagatccgtccaacctgcaagggaaagtccaaaagcaccaggcttttgaggctgagctctcagccaaccagagccgtattgatgccctagagaaagctgggcaaaaactaatagatgtgaaccactatgccaaggaagaagtagcagctcggatgaatgaggtcatcagtttgtggaagaaacttctagaggccacagaactgaaaggagtcaagctccgagaagccaaccagcagcaacaatttaatcgcaatgttgaggacattgagttgtggctgtatgaagttgaaggtcacttggcttcagatgattatggtaaagacctcactaatgtccagaacctccagaagaagcatgctctgctagaggcagatgttgctgctcaccaggatcgaattgacggcatcacaattcaggcccgccagttccaagatgctggccatttcgatgccgaaaacattaaaaagaagcaagaggcccttgtagctcgctatgaggctctcaaggaacccatggtggcccggaagcagaagctggcagattctcttcgtctgcagcagctcttccgagatgtggaggatgaggaaacctggattcgagaaaaggagcctattgctgcgtccactaacagaggcaaagatcttattggagtccagaatctgctaaagaagcaccaagctttacaggcagaaattgctggccatgaacctcgcatcaaagcagtgacacaaaagggcaatgccatggtggaggaaggccattttgctgctgaggatgtgaaggccaaactgagtgagctcaaccagaagtgggaggcactgaaagccaaagcctcccagcggaggcaggatctggaggactcactacaggcccagcagtactttgccgacgccaatgaagctgagtcctggatgcgggagaaggagcccattgtgggcagtaccgactatgggaaggatgaagactctgctgaggctctgctcaagaagcatgaagctttgatgtccgatctcagtgcctacggcagcagcattcaagctttgcgagagcaggctcagtcatgccggcaacaagtggcccccatggatgatgagactggcaaggagctggtcttggctctctatgactatcaagagaagagccctcgtgaggtcaccatgaagaaaggggatatcctcaccttgctcaacagcacaaacaaggactggtggaaagtggaagtgaatgaccgtcagggttttgtgccagctgcgtatgtgaagaagctggaccccgcccagtcagcctcaagggagaacctcctggaagaacagggcagcattgctctgcggcaggggcagatcgacaaccagacacgcataactaaggaggccggcagtgtatctctgcgtatgaaacaggtggaagaactgtatcagtctctgctggagctgggtgagaagagaaaaggcatgttggagaagagttgcaagaagttcatgttgttccgggaagcgaacgagctacagcagtggatcaacgagaaggaagctgctctaacgagtgaagaggttggcgctgacttggagcaggtcgaggtgctgcagaagaagttcgatgacttccagaaggatctgaaagccaatgagtcccgcctgaaggacattaacaaagtggccgaggacctggagtctgaaggtctcatggcggaagaagtgcaggccgtgcagcagcaggaggtgtatggtatgatgcccagggatgaagcagattccaagaccgcctccccatggaagtctgctcgactgatggtccacacagtggccaccttcaactccatcaaggagctgaatgagcgctggcggtccctgcaacagctggctgaggaacgtagccagctcctgggcagtgcacacgaagtacagaggttccacagggatgcggatgaaaccaaagaatggattgaggagaagaaccaggctctgaacacagacaactatggccatgatctagctagcgtccaggccctgcagcgcaaacacgaaggcttcgagagggaccttgcagctcttggtgacaaggtgaattcccttggggaaacagcccagaggctgatccagtcccaccctgaatctgcagaggacttaaaggaaaagtgcacagagttaaaccaggcctggaccagcctagggaagcgtgcagaccagcgcaaggccaaactgggtgactcccatgacctgcagcgcttccttagcgatttccgggacctcatgtcttggatcaatggaatacgagggttggtatcttcagatgaactggccaaggatgtcactggagctgaggctttgctggagcgacaccaggaacaccggacagaaattgatgccagggctggcactttccaggcatttgagcagtttgggcagcagctgttggctcatgggcactatgccagcccagagatcaaggagaaacttgatattcttgaccaggagcgcacagacctggagaaggcctgggttcagcgcagaatgatgctggaccactgcctggagttgcagctgttccatcgagactgtgagcaagcagagaactggatggctgcccgggaagccttcctaaacacagaagacaaaggagactcgctggacagtgtggaggctctgatcaaaaaacatgaagacttcgacaaagctatcaatgtccaggaggagaagatagctgccctgcaggcctttgccgaccagctcattgctctggaccactatgccaagggagacattgcaaaccgacgcaatgaggtcctggacaggtggcgccgcctaaaagcccagatgattgagaaaaggtcaaagctcggagaatctcaaacacttcagcagttcagccgggatgtagatgagattgaagcttggatcagtgagaagttacaaacagccagcgatgagtcatacaaggaccccaccaacatccagagcaagcaccagaagcaccaagcctttgaggcagaactgcacgccaatgctgaccgaatccgtggagttattgacatgggcaactccctcattgagcgtggggcctgtgctggcagtgaggatgctgtcaaggcccgcctggctgcccttgcagaccagtggcagttcctggtgcagaagtcagctgagaagagccagaagctgaaagaggccaataagcagcagaacttcaacaccgggatcaaagactttgacttctggctttctgaggtggaggctctcctggcatctgaagactacggcaaagacctggcttccgtgaacaacctgctcaaaaagcatcagctgctggaggcagacatatcggcccacgaggatcgtctgaaggacctgaacagccaggctgacagcctgatgactagcagtgccttcgacacctcccaagtgaaagagaagcgggacaccatcaatggacgctttcagaagatcaagagcatggcaacctcccgaagagcaaaactgagcgagtcccatcgcctgcaccagtttttccgagacatggatgacgaggagtcctggatcaaggagaagaagttgttagtgagctctgaggactatggcagagacctcactggtgttcaaaatctgaggaagaaacacaagcggctagaagccgaactggccgcacacgaaccagccattcagggtgtcctggacacggggaagaagctgtctgatgacaacaccatcgggcaggaggagatccagcagcgtctcgcacagtttgtggagcactggaaggaactgaaacagctagcagctgcacggggccagcggctggaggagtccttggagtatcagcagtttgtggccaacgtggaggaggaggaggcttggatcaatgagaagatgaccctggtggccagcgaagactacggggacactcttgctgccatccagggcttactgaagaaacatgaagcatttgagacagacttcactgtccacaaggatcgagtgaatgatgtctgtactaatggacaagacctcattaagaagaacaatcaccatgaggagaacatctcttcaaagatgaagggtctgaatggtaaagtgtctgacctggagaaagcagcagctcagcggaaagcgaacgtggatgagaactcggccttccttcagttcaattggaaggctgacgtggtggagtcctggattggtgaaaaggagaacagcttgaaaacagatgattatggccgagatctgtcttctgtccaaactctgctcaccaagcaggagacatttgatgctggcctgcaggccttccagcaggagggcattgccaatatcactgccctcaaagaccagctgctagctgccaagcacattcagtcgaaggccatcgaggcccgacatgcctccctcatgaagaggtggacccagctgttggccaattcagctacccgcaagaagaagttgctagaggcccagagtcatttccgaaaggtagaagacctcttcctgacctttgccaaaaaggcatcggctttcaacagctggtttgagaatgcagaagaggacctcacagacccagtgcgctgcaactctctggaagaaatcaaagccctccgagaggctcatgatgccttccgctcatcgctcagctctgcgcaggccgacttcaaccagctagccgagctggaccgtcagatcaagagtttccgagtggcctccaatccctacacctggttcaccatggaggccctggaagagacgtggaggaacctacagaagatcattaaggagcgagaactggagctgcagaaggaacagcggcggcaggaggagaatgacaacgtacgccaagagtttgcccagcatgccaacgcgttccaccagtggatccaggaaacaagaacgtatctcctcgacgggtcctgcatggtcgaagagtcgggaactctggaatctcagcttgaagctaccaaacgcaagcaccaggagattcgggccatgagaagtcagctgaagaagattgaggacctgggtgctgccatggaggaagccctcatcctggacaacaagtacactgagcacagcactgtgggcctggcccagcagtgggaccagttagaccagctgggcatgcgcatgcagcacaacctggagcagcagatccaggccaggaacacaacaggagtcactgaggaggccctcaaggagttcagcatgatgttcaaacacttcgacaaggacaagtctggccggctgaatcatcaagagttcaaatcctgccttcgttctctgggttacgacctgccaatggttgaggaaggagagcctgatcctgagtttgaggccatactggacactgttgatcccaacagggacggccacgtctccctgcaagagtacatggctttcatgatcagccgtgaaaccgagaatgtcaagtccagtgaagagatcgagagtgctttccgggccctcagctccgagggcaagccttatgtgaccaaggaggagctctaccagaacctgacccgggaacaagctgactactgtgtctcccacatgaagccctatgtggatggcaagggccgcgaacttccaactgccttcgactacgtggagttcacccgttctctctttgtgaattgatcaatcctcttggcttccagacagcctgacccacatgcttgccctgctatctgtcacctttgctgcatgtcactccctctgctttcaaggacaatattccagacagcgctactttccagtgtaaccatagcctgcttagcttggggtaagacttagtagaaaatggtgcttcagtaaaccgcttacttccagtcacaatcaccttgttgctgtgggaacccgaccctgtttgagcgggctgccctcattcccacttaaatcaaagcagctggctagtccccctgtttccttcccaaatcctttcatgtacaagacaaaataaaggactcaattctccct

SEQ ID NO: 205 - DNA, 2600 bp, Homo sapiens
  misc_feature (1714)..(1714): n is a, c, g, or t
gcgatctactctcagtcttcctgagtcacaggctaccaaggacaagtagctctgtctgccctttgttgaggggagctgtgacactggtttgctgctgctgctgctgctgctgctgcatcttctttgggaaatcagactcaataaactgccatccatctgaggttctcaactcagagccatctacctggagcatgggactttcaaatgtccagctctggacaatactgctgtgggcattggcatgggtgcagagtacaagatctgcgtgcccgtcctgtggggccccaactctgacaccccaaggagaacgcgctctggtcctagagctagccaagcagcaaatcctggagggactgcacctaaccagccgtcccagaataactcgtcctctgccccaggcagcactgaccagagccctccggagactgcagcccaggagcatggtccctggcaaccgagagaaagtcatcagctttgctaccagcatagacaaatccacttcaacctaccgctccgtgctcaccttccaactgtcccctctttggtcccaccacctgtaccatgcccgcctctggctgcacgtgcctccctcttttccggccactctgtatctgaggatcttcggttgcggtaccacgaggtgcagaggatcccgcacgttcctagctgagcaccaaaccacttcctccggctggcacgccctgactctgccctctagcggcttgcggagtgaggaatctggagtcacaaaactccaactggaattcagacctctggaccttaacagcactactgccagactgccacggctgctgttggacacagcgggacagcagcgtcccttcttggaacttaagatccgagctaatgaacccggagcaggccgggccaggaggaggactcccacctgtgagtctgagacccccttatgttgtagacgagaccactatgtcgatttccaggagctggggtggagagactggatcctgcagccggagggataccagctgaattactgcagtgggcagtgcccgccccacctggctggcagccctggcattgctgcttccttccattctgctgtctttagcctcctcaaagccaacaacccttggcctgcgggttcttcctgctgtgtccccaccgcgcgaaggcctctctccctcctctaccttgaccataatggcaatgtggtcaagaccgatgtgccagacatggttgtagaggcctgtggctgcagctagcaagaggacctgaaggttttgagtgaagttcaaggttcaagttgggggttcccaagcaaaagggtcctgtgtctggaagcacaagttccggatccatactgacacccaacaagctgtgtagcagtatgcctgagtttgacccctgtggaactcaaatgggcatttttcttgtcccagattctggcctatttcaggctgtttcaaatgtggacagatgggtaaaacgtttcctttcgagaaactgcctggccagcaccatttcctacatcaagccctgttccaggacagcaggggatgccgtgggagggaaggaagaatgcagggaaaactacttagtctctcccgaaaaagaattcctcaagtaataaaggaggaattagaaggttaggcagattggggaaaggtatacaggctaagaacagggactgttgcctgctttgagcaaggtcaagaggaatatgagcaggcantgaggtgggagagcagttaggaggccctggaattgacagtcagtaaaaaggggtgctgaacccataagttctctagcttccccttggggagaggacccatgtaaatgacatacgtttatattttcttaataaaaaggagaaagaaaagcaacagtgtgtaaggggttgttaaaatgagccagaaacaaagtgtggtctggggacctctgtgcttcggggccttttcaaggggttttcaaactatttgcataatcacatagagaagttatttgtcatttactatcattattttttcattgttctgtgggaacagggtttacacttataactacagccctcaggaggctgagacaggaggatcgccgtgagttcaagaccagccttcatagtgaatgctgggctagcctgagctatggagtgagatcctgtctcaaagcaaaagaaacaaacaaaacaacaaagactaagtagtgagtctttccagagtgtattatatgatacagccgatgacattgtggcttatatattctcctttctctcctttaaacaattttatttatttttattgtatgtgtatgatgagtcttaggcctgcaccggcttgcagtgcccatagaggtcagaagaggacgctggatccttggaactaaagttagagcagtgtgagctgcctgtgtctgttaacagaactcaggtccacagtaagagaaacaaacaattaaaggctgagctacctctccacctgagacatgtgcacacacagtcacacattgttttgttttgtttggaaacagcccacgctatcttggaactctcaatcctcctgcctcagaccctcctgccctggaattaaaggcataaaccaccaaaaaaaaaaaaaaaaaaa

SEQ ID NO: 206 - DNA, 2524 bp, Homo sapiens
ggcctaggcttgccgtgcgagtcggacgtggtccgggcccaccctgctctgtactactactcggctttctcgtcaagatgcctgaggaagtgcaccatggagaggaagaggtggagaccttcgcctttcaggcagaaattgcccagctgatgtccctcatcatcaacactttttactcaaacaaagagattttcctccgggagttgatctctaatgcttctgatgccctggacaagattcggtatgagagcctgactgacccttccaagttggacagcgggaaagagctgaagattgacatcatccccaaccctcaggaagccacgctgactttggtggacacaggcattggcatgaccaaggctgacctcataaataacttgggaaccattgctaagtctggtacaaaggcgttcatggaggctctccaggctggtgcagacatctccatgattgggcagtttggtgtcggcttctactctgcctacctggtggcagagaaagtggttgtgatcacgaagcacaacgatgatgagcagtatgcctgggagtcttctgctggtggatccttcactgtccgtgcagaccacggtgagcccattggccggggtaccaaagtgatccttcacctcaaagaagaccagacagagtacttagaggagaggagggtcaaggaggtggtgaagaaacactcacagttcataggctaccccatcaccctctatctggagaaggaacgcgagaaggagatcagtgatgatgaggcagaggaagagaaaggggagaaggaggaggaagataaggaggatgaggagaagcctaagattgaggatgtgggatctgatgaggaggatgacagcggcaaagataagaaaaagaaaacaaagaagatcaaggagaagtacattgaccaggaagagctgaataagacgaagcccatctggaccagaaatcctgatgacatcactcaagaggaatatggtgaattctacaagagcctcaccaatgactgggaagaccacttggcagtcaagcacttctctgtagaagggcagttggaattcagggcattgctcttcattccccggcgagctccctttgacctctttgagaacaagaagaagaagaacaacatcaaattgtatgtccgtcgtgtgttcatcatggacagctgtgatgacctgatacctgagtacctcaacttcatccgtggtgtggttgattccgaggacctgcctctgaacatctcccgagaaatgctccagcagagcaagatcctgaaagtcatccgcaaaaacattgtgaagaagtgccttgagctcttctctgagttggctgaagacaaagagaactacaagaaattttatgaggcattctctaagaatttaaagcttggaatccatgaggattccactaaccgtcgccgcctctctgagctccttcgctaccatacctctcagtctggagatgagatgacttccctgtcagagtatgtgtctcgcatgaaggagacacagaagtccatctactatatcactggtgagagcaaagagcaggtggccaactctgccttcgtggagcgtgtgcggaaacggggctttgaggtggtatacatgactgagcccattgatgagtactgcgtacagcagctcaaggagttcgatggcaagagcctggtctccgtgaccaaggagggcctggagctaccagaggatgaggaagagaagaaaaaaatggaggagagcaaggcaaggtttgagaatctctgcaagctcatgaaggagatcttggacaagaaggttgaaaaagtgactatctccaataggcttgtgtcttccccctgctgcattgtgaccagcacctacggctggacagccaacatggaacggattatgaaggcccaggcactgcgggacaactcgacaatgggctacatgatggccaagaaacacctagagatcaaccctgaccaccccattgtggagactctgcggcagaaggctgaggcagacaaaaacgacaaagctgtcaaagacctggtggtgctgctgtttgagactgctctgtcttctctcgcttctcactttaggaggcccaaaacccactccaaccgcatctaccgcatgattaaactaggcctgggcattgatgaagatgaggtcactgcagaagagcccagtgctgctgttcccgatgagatccccccactggagggtgatgaggatgcctctcgcatggaagaagtggattaaaggctcctgggaagcccccgccctctgtatagtatccctgtggctcccccaacagccttgactggccctgacccacctgggctctctctgctcatgtctacaagaatctcttctatcctgtccttgtgccttaaggcaggaagatcccctcccacagatagcagggttgggtgttgtgtattgtgtttttttgtttgttttattttgttctgaaattaaaagtatgcaaaataaagatgatgcagttttaaaaaaaaaaaaaaaaaaaaagg

SEQ ID NO: 207 - DNA, 2524 bp, Homo sapiens; identical to SEQ ID NO: 206

SEQ ID NO: 208 - DNA, 2352 bp, Homo sapiens
gggagcagcgagcaagcaggtcctcagcgtccagtcaccgctctaagccaggcgccatgcatcccgcgcgccccgcgctctgggcggctgcgctcaccgccctcactctgctccgcggaccgccagtggcgcgggccggcgcgggcgcggtgggcgcgggccccgtggtgcgctgcgaaccgtgcgacgcgcgtgcgctggcccagtgcgcgcctccgcccaccgcgcccgcgtgcacggagctggtgcgagaacccggctgcggctgctgcctgacttgcgcgctgcgcgaaggcgacgcgtgcggcgtctacacggagcgctgtggcaccggcctccgctgccagccgcgaccggccgagcagtatcccctgaaggcgctgctgaatggccgcgggttctgcgccaacgccagcgccgccagcaacctgagtgcctacctcccctcccagccgtctcctggaaacaccactgagtctgaggaggaccacaatgctgggagtgtggaaagccaggttgtccccagcacacatcgcgtgactgattccaagttccatccactccattcaaagatggaggtcatcataaaaggccaggctagggacagccagcgctacaaagttgactatgagtcccagagcacagacacccagaacttctcctccgagtctaagcgggagacagaatatggtccctgccgcagagaaatggaggacacactgaatcatctgaagttcctcaatgtgctgagtcccaggggcgtccacatcccaaactgtgacaagaaggggttctataagaagaaacagtgtcgcccttccaaaggcagaaagcggggcttctgctggtgcgtggacaagtacgggcagccattgccaggctatgacaccaaggggaaagacgacgtgcattgcctcagcgtgcagagccagtagataccgctgtgccacttaacgtggagctcaaatacgccttattttgcacaaaagactgccaacaacgtgatcagcagctggctataccttgatttatatttctctctctctctctctctctctctctctctctctctctctcttttgtggtgaactgaataaaaacaaacaaaacacatacaaaaacaaaaacaaaaaaaaaagccaagtttagacagatttctgaaatgcctctggttgtttaaatagtgaacttggtcatctttgtatctcgcagtagtcaaccaaaagcagtttgaattttcttgttgcttcctatgaaaaccacacgtgtactccaggccacggatgccgtcgccccctaactcacccacccactgtgggcttcagtgctgctggccctctgccttcttgatttcagaggctctgttgctgatagagaaaaaccctctttccatcccctgtaagtaagtgcaggcactgtggagaatggggaagcctggaacccagtgacccggacgtctggaagcatcctcctgaggcctctggtccttattgtgccatctctgaatcaagggcctggccctgtatctgcaagtggcctgacctacttgggaactgtgggagagaaaaatgtgttgtctctcttactaaaaatgactaagaatgttctagggcgctccgagagcccataaagacaaggacaaggaccttcctttgtcaggcagcttcctgatgacttggcccagcagaaatatcaaactccatgtgcagagatgtcgcaaataacggtgcgcttagttctccggatgacttcaagaaaacagtgttttctggcccagcctctcaaaataaaatttgttgtggggtggggctgaggggaggcagctttcaaaagagagaaggttttcatcttccttgttggagaccctggtaagaacatggagagaatcacctgtttgttgatcttggggtccttctcaaactttctttataattcatgcgtatatgcagacaaaatatgttcttaattgttaacattgtatacaacatagcccaaatatattagaatctgtactagataatcctagataaaaggttagagatgctaggtgatgtaaccacagacacgcccgaggaaaggagcctgtgtctggaggctgggccgctttccccgaggccaaggccatggtggtctggcaatacagggtgtgaggagactgtactgcatcccacggggtggacatgcgctgtacagagctttccttgagagcacaaaggaatcttgagacattctgcctgcctgtcagcttttctttatttttttaattaagtttttgggggaaaaatgtatttttgaaaagtttgtcttgcaatgtatttataaatagtaaataaagtttttttactatttaag

SEQ ID NO: 209 - DNA, 1088 bp, Homo sapiens
gcgcccgccgccgcgctctgtatgccgcgttcccccggcgcacccgccgccgatagtctgagccggaggagtcgccgccgctgcggttgatgtggttgggccggggctgaccaggctaccaagatgcctcagtccaagtcccggaagatcgccatcctgggctatcggtctgtgggaaagtcctcattgacaattcagtttgttgaaggtcaatttgttgattcctacgatccaaccatagaaaacacattcaccaagctgatcacagtaaatgggcaagagtatcatcttcagcttgtagacacagcagggcaggatgaatattccatttttcctcagacatactccatagatattaatggttatattcttgtgtattctgttacatcaatcaaaagctttgaagtaattaaagttatccacggcaagctgttggacatggtggggaaagtgcagataccgattatgttagtcggaaataagaaggacctgcatatggaaagggtgatcagttatgaagaaggaaaggctttggcagaatcttggaatgcagcttttttggaatcttctgcaaaagaaaatcagactgctgtggatgtttttagaaggataattttggaagcagaaaagattgacggagcggcttcacaagggaagtcttcgtgctcggtgatgtgacgcgcctgctgcagagcctgagtgtattccacctgaggaagcaagctgcctgtcatccttgaagataaaactaggcttctgttttcttctgttaacctgaacgatgtcatttgggtcagaggtcctcccctctcagattatgttaacgtctgactctgtccaaatgagttcacttccattttcaaattttaaacaatcatattttcaatttatatattgtatttcttaatattatgaccaagaattttatcggcattaatttttcagtgtagtttgttgtttaaaataatgtaatcatcaaaatgatacacgttacactactattagctaggcttcagtctatcagtgtttatctccttgtgttaaatgtatacttgtaaataaagtagctgcaaaccttaaaaaaaaaa

SEQ ID NO: 210 - DNA, 1885 bp, Homo sapiens
gcaaaattaatttattggccactgttcgcttagagggcggaggaagccgactgtttcggtctctgcataacaggcccaaacctttgctccagagatcatggctgccgaggatgtggtggcgactggcgccgaccccagcgagctggagggcggcgggctgcttcaagagattttcacgtcgcctctcaacctgctgctccttggcctctgcatcttcctgctctacaagatcgttcgcggggaccagcccggtgccagtggggacaacgacgacgacgagccgcccccgctgcctcgcctcaagccgcgtgacttcacccctgccgaactaaggcgatacgatggagtccaggacccgcgcattcttatggccatcaacggcaaggtgttcgacgtgaccaaaggccgcaagttctatgggccggagggaccatacggggtctttgctggaagagatgcatccaggggccttgccacattttgcctggacaaagaagcactgaaggatgagtatgatgacctttctgacctcactcctgcccagcaggagaccctgaatgactgggactctcagttcagttcaccttcaagtaccatcacgtggggaaaactgcttgaaggagcggaggagccgattgtgtactcggatgatgaagaacaaaagatgaggctgctcggaagagtgactgaagcagtcagtggagcatatctatttttgtattttgcaaaatcatttgtaacattccagtctgtctttacaacatggtgatttcaatatttagagaagttttgaacttgtaagttttttaagtaacatcactagtgacaccgataaaatcaactcgtcttagaatgcatgatgtgtttgtacgtcacaaatccagaaagtgaactttagttctctagatccaaatggtaaagctgtttctcttctatctgtagttaaaactgaattacaattttattttcctgagagggaaaacttgggttatttccacaaactggccttttttcaagtgcacacacacacagtggccccaaatggtcaatgtactaagaatgaagagagaaggtcttagccatgctatagtctgaaaacaagcccattttacccaacagacttaactgcatgatttttgttttatctacctctaaagcaaaactgcagtgttccaaagtctgtggtattgattcaaaacagaagtccagtaacaaaatgaaaactcaataatgggtttagttggggcaaacacattgcctgtgttcatggactgatttatcatccctgtccccacgtggacactcccacacacagtaactctcacacacctggtaattggcagttggaactacaacagaaatctgaaaattcaaggtagaactttgcaaaagaaaaatctgttgcttgtagcagggcaatggttatgtggttattggccaaatgtaaaatttgagagcaatatacaggacaggaacaggtgtgcgcttttcaaaagcttccactgacatctctgaagaatgagaaaacactacatggcactagctgggtgattttgaaaggaaaatacattcctaaggtaacagttaatcctctgttgttacaaaactcgtagtcgcttcaaaaatagtagtcaggtgtctaggtcttggataatactcttggttaatactaaacctagcttaagtagactctgcagttgtatacatttgttaaaagtattatctgaacaactagtgaggtttcagactcttgtaattgtagttaaatagtcattgtattttcttgtgagctgtgtttaatggttttacctcaaatcagaaaaaaatgaagtgcttgggtcagttaataaaacggttttgcccagtaaaaaaaaaaaaaaaaaaa

SEQ ID NO: 211 - DNA, 1915 bp, Homo sapiens
ggcgagcggaggaggaggcacagcggccggcggccgagcactgcggagcgagccagcgggccggcgccagcgcccagcagccgcctggggccgcaggaagcaccccggggagcggcggcggcgtgtgcgtgtggcccgggtgcgggcggcggcgcgggagcagcgcagagcggcagccggttcgggcgggcggcatcatggacgagaagttgttcaccaaggagctggaccagtggatcgagcagctgaacgagtgcaagcagctctccgagtcccaggtcaagagcctctgcgagaaggctaaagaaatcctgacaaaagaatctaatgttcaggaggttcgatgtccagtcactgtgtgtggagatgtgcatgggcaatttcatgacctcatggaactctttagaattggtggtaaatcaccagatacaaattacttgtttatgggagactatgtggacagaggatattactcagttgaaacagttacactgcttgtagctcttaaggttcgttaccgagagcgtatcaccatactccgagggaatcacgagagcagacagatcacacaagtttatggtttctacgatgagtgtttaaggaaatacggaaatgcaaatgtttggaaatacttcacagacctttttgactaccttcctctcactgccttggtggatgggcagatcttctgtctacatggtggtctttcaccatccatagacacactggatcacatccgagcacttgatcgcctacaagaagttcctcatgagggtccaatgtgtgacttgctgtggtcagatccagatgaccgtggtggctgggggatatctcctcggggagctggttatacctttggccaagatatttctgagacatttaatcatgccaatggcctcacgttggtgtccagagctcaccagctggtgatggagggatataactggtgccatgaccggaatgtagtaacaattttcagtgctccaaactattgctatcgttgtggtaaccaagctgcaatcatggaacttgatgacactcttaagtattctttcttgcagttcgatccagcacctcgtagaggcgagccacatgtcactcgtcgtaccccagactacttcctgtaatgaaagtttaaccttgtacagtattgccatgaacaccgtctgttgacctaatggaatcgggaagagcagcagtaactccaaagtgtcagaaatagttaacattcaaacttgtttccacacggaccaaaagatgtgccatataaaatacaaagcctcttgtcatcaacagccgtgaccactttagaatgaaccagttcattgcatgctgacgcgacattgttggtcaagaatccagtttctggcatagcgctatttgtagttacttttgctttcttgagagactgcagatctaggatgtaacattaacacctgtgagtccagttgacttccacttagctgtagcttactcagcatgactgtagatgaggatagcaaacaatcattggagcttaatgaacatttttaaatgagtaccaaggcctcccctcttgttgtgttctttcagggatactattaatttaattgtatgatttctctgcactcagtttctcccttctcaaatctcggccccgcgttgttctttgttactgtcagaaaacctggtgagttgttttgaacagaactgtctccctcctgtaagatgatgtactgcacaagtcaccgcagtgttttcataataaacttgagaactgagaaagtcaggtttgaattgtatcagtgggcacgactggtgctgtttattaaacaagataaatctattgatcaatttcagaatttgtagaattccaggtaaagaaaaataaagatcaaggccactgtgtaaaaaaaaaaaaaaaaaaaaaaaaaaa

SEQ ID NO: 212 - DNA, 3504 bp, Homo sapiens
ctctgcttttctctttcagagctgttgcgcagccattggtacctgtattggggaaacatagcatacaagcaagaagcttacagcctcagtggcgaaaaatttttcatgtcagagaccgagaactcttgcagtcgtttatgtcatcccttcttctccagacagaagataccaaaaagttgcaatcaaagatctgttcatcttattgataaagtcactaataagccaaaatgtctgtcaacgtcaaccgcagcgtgtcagaccagttctatcgctacaagatgccccgtttgattgctaaggttgagggcaaaggaaatggaatcaagacagttatagtcaacatggttgacgttgcaaaggcgcttaatcggcctccaacgtatcccaccaaatattttggttgtgagctgggagcacagacccagtttgatgttaagaatgaccgttacattgtcaatggatctcatgaggcgaataagctgcaagacatgttggatggattcattaaaaaatttgttctctgtcctgagtgtgagaatcctgaaacagatctgcatgtcaatccaaagaagcaaacaataggtaattcttgtaaagcctgtgggtaccgaggcatgcttgacacacatcataaactctgtacattcattctcaaaaacccacctgagaatagtgacattggtacaggaaagaaagagaaagaaaagaaaaatagaaagggcaaggacaaggaaaatggctctgtatccaccagtgagacaccaccacctccaccaccaaatgaaattagtcctccacatgctgtggaagaagaggaagatgatgattggggggaggatacaactgaggaagctcaaaggcgcagaatggatgaaatcagtgaccatgcaaaaggtctgacacttagcgatgatttggaaagaactgtagaagagcgtgttaacatcctgtttgattttgttaagaaaaagaaagaagagggcattattgattcatctgataaagacattgtggctgaggcagaaagactggatgtaaaagccatgggccctctcgttttgacagaagttctctttgatgagaagataagagagcaaatcaagaaatacaggcgccattttttaagattttgtcataacaacaaaaaggcccagcggtaccttcttcatggtttggaatgtgtggtagcaatgcatcaagctcagttgatctccaagattccacatatcttgaaggagatgtatgatgcagaccttttagaggaagaggtcattatcagctggtcagaaaaggcctctaagaaatatgtctcaaaagaacttgccaaagagattcgtgtcaaagcagagccatttattaaatggttgaaggaagcggaggaggaatcttctggtggtgaggaagaagacgaagatgaaaatattgaggtggtatattcgaagactgccagtgtaccaaaagttgaaactgtgaagtctgacaacaaggatgacgacattgatattgatgccatttaaaaggatggatgcaacttagcttaacagtgtaatgctgcaaatttttctccattatcagccagaagtgcaacatgtatgtgcaagagctaaagtggcttaacatcatgctacacttgatactaaaaagctattactgtgagtggtctataattaagcccaatgagacatctagggagtccatacatatcagtgagcagttgtagtttgcttatttatagcatgtttctttcggaaaaactagtggtggacacatttggatcacatttatacagttataaaaaataaagatttgattttggtcattcttcagactttgggctatgaatggcttatgctgaagtaattggctacttttaggatgttacaccatttaataacttagacttcttaagtttggtagattgttaggtactgaagacttgaagaatgcaaacaattataatgaccttactcagccattaagaaatgaagtattttgaaagttgtgtctccagtccattgagattggcaactgacaattcttgtcattctaaggaaatttgatgatttaatgacagtgtgacatcctcatgagaagtaaaaatgacctgtgtgtcctatggtttaagagcaaattttgaaacttggagttgtggtttttcagtttgtgtacactcaccccaaattgtagtctattgagtcatgtgcattgcacgttggataagccagggaaatgacaaataagtattttgtgtgtatttagtggttgctttgtactgagagaaaagctttgaggtgtgattaaatcgtaaactctgattctatttgggagaaacaggaaaaaggtgcacttaatctaaaacagcataagttttcaacttttacccttaaattataatttcaagatgtttagacatactgtatcttgtgtttgatgtgttccccctccctaatattatggtttattctttaatgccttttaatttggatataatagcttgtactttagattttggttgctatcttgccaaaataagtgttactgtttttcaagcttgatccccttccctgattgtcttatttaaagagaaagttaaactcatacttctgagtcagagcctgtattttggttaagacttgggatattttttacttcacattgaatatagctggatacctgagaagtctggtgatggcactgggtgggtgcagctagctaaggcctgaccagcccattcagagccttggacttcagacacaaaagtgagtttcttacccacttgctggtgtaaactctatctggggtcctgactatatttgaatacttgtcttcaatattaaaaaacatagcacatttttctttctacaaaagtacattctggagttaagaacccatgtggttgatttgtgtgtggcgtgctagctcatacattatttggatcttattctttgtgtcatccatctcacagattataagactttgattaatgtaaaaagtatgcgttaaaatcataccaaacatttggtaaaattaaaaccttgatgggaggctgggcgtggaacaggagccatatacctggaatggtaacaggggaatgtgctatgtcacaccaaagaagtgggacttggaaagtcacttgtctcctgggtttcagactctttgttgcatgggcagcccatccatatgtcattactttttgagattctcaagtagatcagcacatttcggcctcaggttggcaagattttgtcttagagctgttgctttaaagggaaatggtcaggtcttagacacttaggaaggtcttgggcttctgttcattctggtgccaaaccagtgggattcaaatttcacacaatctgggtttttattcatggaggttaacctggtaagagtaatccttcatggctctattgaggtgtcttaaaaagtttcctgtttcaaacagctacattacttgattaaaacaatgttataaaattaaatttccccctcctttcatattaa

SEQ ID NO: 213 - DNA, 783 bp, Homo sapiens
atgaagatcgaactactgcctgccctgaccgacaactacatgtacctgatcattgatgaggacacccaggaggccgccgttgtggacccagtgcagccacagaaggttatagaaactgtgaaaaagcaccgtgtgaagctgaccacagtgctcaccactcaccaccactgggaccacgctggtgggaacgagaagttggtgaagctggaacctgggctgaaggtttatggaggtgatgaccgcattggggccttgacccacaaggtcacacacctttccacactggaggtggggtctctcagtgtcaaatgtctgtcaacaccctgccatacttcagggcacatctgttactttgtgagcaagcctggtagctcagagccttctgctgtgttcacaggtgacacattgtttgttgctggctgtgggaagttctatgagggaaccgcagacgagatgtacaaggcgctgcttgaagtcttaggccggcttcctccagacacaaaagtcatctgtggccatgaatacaccgtaaacaaccttaagtttgcgcgccatgtggagcccggcaataccgccgttcaagagaaactggcctgggccaaggagaagaatgccatcggggagcccacggtgccatccaccctggcagaggagttcacttacaaccccttcatgagagtgaaggagaagaccgtgcagcagcacgctggagagaccgaccctgtgaccaccatgagggccatccgcagggagaaagaccagtttaaggtgcctcgggactga

SEQ ID NO: 214 - DNA, 568 bp, Homo sapiens
  misc_feature (483)..(483): n is a, c, g, or t
atcaggatagaaatttatttaaatccaaaataatatgactatagttagaataatataataattatctaaaggaaatatcatcattggctctgaaacagtctaacggtgtcatttttctggagtcaaaaacatgtagtaaaaggatatacaggaagcaaaaatacagaagcaagccggctgagtgaggaagctgtaacaggagggtacactaagatactgtaacaatcgagacaggaagacaagtatagcaagctgtcttacctatcaacccctgcacagtaagtcagtaacccagaatgaaggaataatagcacgtggttaacaggacaaatttccctctaatttgtctttgtaactgatttctttccttttttaccatgggttccatctggttaacaaaacatttggttttatttgtaaagcagagtaaataaaatatcctgatcagagtgctcaattttgtttaaggtgctcaaggttcanacttaaaaaggtcaactgggctagtcagtgggaaccattgggtgtgtttgctaaacagatgaaagcagcagcatttaaaatggat

SEQ ID NO: 215 - DNA, 435 bp, Homo sapiens
ctctttcgagtcttggctccaatatgaccaaaaaaaggagaaacaacggtcgtgccaaaaagggccgcggccatgtgcaaccaattcgctgcacgaactgcgcccggtgcgtgcccaaggataaggccattaagaagtttgtcattcggaacattgtagaagccgctgcagtcagggacatatctgaagcaagcgtcttcgacgcttacgtgcttcccaagctctatgtcaagctgcactactgcgtgagctgtgccattcatagcaaggttgtcaggaatcgatctcgtgaggcccggaaggaccgaacacccccaccacgattcagacctgctggcgctgcaccacgacctccaccaaagcccatgtaaagaggtgatttcatgaagacagaaagaaaaataccatggaaaaataaaactgaagttatacttt

SEQ ID NO: 216 - DNA, 410 bp, Homo sapiens
agaacaacaaatcaaaatgtaaacttaaaatataaccaaaagagggacagctctttaggaaaaggaaaaaaccttaaatagtgaataaacaactacaaccacttaaccattgtaggcttaaaagcagccatcaataaagaaagcgttcaagctcaacatacatacttacacacactaattccacaaacctcaataaattcctatattacaaattgggctaatctatagacccatagatgaaatactgttaatatgagtaacaagaaccaattctcctagcacaagtgtatgacaacccggataaccattgtcaattatcgaatcataggtactaacccaacaataaaattacctatccctaactcgttagcccaacacaggcgtgctttaaggaaagattaacaaaaaaa

SEQ ID NO: 217 - DNA, 1736 bp, Homo sapiens
tctcacccgcgccgctcctcgcctctcttgttagccggagactcgcctctcagccgcccgccgcacagacgcacgagtatacagtgcagctccatcggctgatccttgctgagctccaagtgtaggcggcaccgggcggcccacgatgccgaagaacaagaagcggaacgctccccaccgcggtggcgggggtggcggcggctccggggcagcgacgtcggcggccacgacaggtggcccgcatcggactgttcaacctttcagtgatgaagacgcatccattgaaacaatgagccactgcagtggctatagcgatccttccagtttcgcggaggatggaccagaagttcttgatgaggaaggaactcaggaagacttagagtacaagttgaagggattaattgacctaacccttgataagagtgcgaagacaagacaggcagctcttgaaggtgttaaaaatgcgctgtcttcaaaagtgctgtatgagtttgttctcgagagaagaatgactttaactgatagcattgagcgctgtctgaaaaaaggaaagagtgatgggcagcgcgcagctgcagcgctcgcgtccgttctttgtattcagttgggccctggattggaaagtgaagagattttaaagactcttggaccaatcctaaaaaaaataatttgtgatggaacagcgagtatccaggctaggcagacttgtgcaacttgctttggtgtttgctgttttattgccacagatgacatcactgagctgtattcaactctggagtgcttggaaggtatcttcaccaagtcctaccttaaagagaaagacacgaacgttccttgcagcactcctaatacagtgcttcacatcagctcgcttctcgcatggacgctactgctgaccatatgcccaatcagtgaagtgaagaaaaagctggagctgcatttccataaacttccaagcctcctttcttgtgatgatgtaaacatgagaattgctgctggcgaatctttggcacttctgtttgaattggccagaggaatggagagtgactttttttatgaagatatggattctttgacccagatgctccgggctctggctacagatggaaataaacaccgtgccaaagtggacaagagaaagcagcgctctgtcttcagagacgtcctgagggctgtggaggaacgggattttccaacagaaactgttaaattcggtcctgagcgcatgtatattgatagctgggtcaaaaagcacacctatgacacgtttaaagaggctcttggatcagggatgcagtaccacttgcagacaaatgaattccttcgcaatgtatttgagctggggccccctgtgatgctcgatgctgcaacacttaaaaccatgaagattcctcgttttgaaaggcatttatataactctgcagctttcaaagctcgaacaaaagcccgaagcaaatgccgagataagagagcagatgttggagaattcttctagatgtctgtctttgatgtctgttttctaatttcttcctttattattatttttgctacttctaatgtacataagcttttagagacttttttatcttggtcaacttagataatttttgatgtagggatgggttatattttaatttaatgtacagtgttacaaattaatgagttctttattctgtaaaaataactgataaccacaaataaaagtgtttgtgatgcttggtcaaaaaaaaaaaaaa

SEQ ID NO: 218 - DNA, 508 bp, Homo sapiens
gccattaaaaaactttattttgatttttttttttttacaaaggatagccccactttggggtgaaaatatatttggttaagtacaaaatatagtttttaatcatacaaaaagatacacaaaatacaaaaacaacaaagacgacacctccatcagctcacactttctggctgcacagttctcgggtggagtgcttagagtggagcttggagctctgacacaggacacggaacaaagtgctaaggcggagtaagttttggagtgctagaggccacggcgagagcagaactttctcctaacactggacaggaaatgggtctgggagcttccatggaaacctgcagttctcactgtgcctccatcactgttagggcatctcaatgtaagagtgtcaccagggtccagctgtcagcagcaacccttcatatgagtagtgtcagaatcacagaagtctgtgtgttgggggaaagcctccaaaagtaataaccaagctgggcctttaacctcagca

SEQ ID NO: 219 - DNA, 3657 bp, Homo sapiens; identical to SEQ ID NO: 143

SEQ ID NO: 220 - DNA, 1296 bp, Homo sapiens
ggggtcgagtccgcgtccacccgcgagtacaaccttcttgcagctcctccgtcgccggtccacacccgccaccagttcgccatggatgacgatatcgctgcgctcgtcgtcgacaacggctccggcatgtgcaaggccggcttcgcgggcgacgatgctccccgggccgtcttcccctccatcgtgggccgccctaggcaccagggtgtgatggtgggtatgggtcagaaggactcctacgtgggcgacgaggcccagagcaagagaggcatcctgaccctgaagtaccccattgaacacggcattgtcaccaactgggacgatatggagaagatttggcaccacactttctacaatgagctgcgtgtggcccctgaggagcaccctgtgctgctcaccgaggcccctctgaaccctaaggccaaccgtgaaaagatgacccagatcatgtttgagaccttcaacaccccagccatgtacgtagccatccaggctgtgttgtccctgtatgcctctggtcgtaccactggcattgtgatggactccggagacggggtcacccacactgtgcccatctatgagggttacgcgctccctcatgccatcctgcgtctggacctggctggccgggacctgacagactacctcatgaagatcctgaccgagcgtggctacagcttcaccaccacagctgagagggaaatcgtgcgtgacattaaagagaagctgtgctatgttgccctagacttcgagcaagagatggccactgccgcatcctcttcctccctggagaagagctatgagctgcctgacggtcaggtcatcactatcggcaatgagcggttccgatgccccgaggctctcttccagccttccttcctgggtatggaatcctgtggcatccatgaaactacattcaattccatcatgaagtgtgacgttgacatccgtaaagacctctatgccaacacagtgctgtctggtggcaccaccatgtacccaggcattgctgacaggatgcagaaggagattactgccctggctcctagcaccatgaagatcaagatcattgctcctcctgagcgcaagtactctgtgtggattggtggctctatcctggcctcactgtccaccttccagcagatgtggatcagcaagcaggagtacgatgagtccggcccctccatcgtgcaccgcaaatgcttctaggcggactgttactgagctgcgttttacaccctttctttgacaaaacctaacttgcgcaaaaaaaaaaaaaaaaaaaaaaaaaaaaaa

SEQ ID NO: 221 - DNA, 333 bp, Homo sapiens
tttttttttttttttttggagtctaaacttttattggtccctcagtccccaaggggttcccttcttctgagccttagtgcctcagaactctggtatcattggtctcggacaccactttgccatccacgaccttacgggtagttgtcctctggacagtttgcatggagttgctggagtccagggcgtcgttgagactgaaatcgtccccatcctccaacaagcggcggtaggtggcaatctccgcctcaagcttgaccttgatgttcaacagggcttcgtattcctgggtctggcgctgtccttctgcccgagtttgtgccagctctgattcca

SEQ ID NO: 222 - DNA, 1303 bp, Homo sapiens
gtggcggtctgagcgagcgcgcccttgcttcaaagcggtagcgactctagcgcctccggctaggctccaacccttctctaccctacgtctcaatagccacaccgcagtctccggcctcaagcgacccaggctatcttccagtcccgggactccgggtactgcggtccccagaaccgcccgtccagggaccaacccaagttccgcaggccgcggcggccgccaatgggggtggagggctgcaccaaatgcatcaaatacctgctcttcgtcttcaatttcgtcttctggctggctggaggtgtgatcctaggtgtagctctgtggttgcgccatgatccacagaccaccaccttgctctacctggaactgggagacaaaccagcacctagcaccttctatgtgggcatctacattctcattgctgtgggagctgtgatgatgtttgtaggcttcctggggtgctatggggccatccaggagtcccagtgcctgctggggacgttcttcacttgccttgtgatcctgtttgcctgtgaggtagctgcgggcatctggggctttgtaaacaaagaccagatcgccaaggatgtgaagcagttctacgaccaggcccttcagcaggctgtgatggatgatgatgccaacaatgccaaggcagtggtgaagaccttccatgagacgctcaactgttgtggctccaatacgctgaccacactgaccaccgccgtgctgaggaacagcctgtgtccctcaagcagcaactcattcactcagcttctgaaggaagactgccatcagaaaatcgatgagctcttttctgggaagctgtacctcattggaattgcagccattgtggtagctgtcattatgatcttcgagatgattctgagcatggtgctgtgctgtggcatccggaacagctccgtgtactgaggcccttcgcttcgcaccagagggtccctggaatgaccagagggcaccttggggggcatggcctgtgtatatactatttctgtattactctgctacacttagcctttttacttttgagtcttttttgttctgaacttttcctgtcaccttttggagccgacaccacacataggtggcgtatgtggggacgtagaggtggagctggccctagctggcagggccctgtacttctgggacccctggagagttctgcctgctgagccaaacctcctccatagctacttgtccagaggccacatagccaagctagaaggccatgtccacccactctgcccactgtgggtcacatcgctcccatctttttaatccg

SEQ ID NO: 223 - DNA, 1303 bp, Homo sapiens; identical to SEQ ID NO: 222

SEQ ID NO: 224 - DNA, 448 bp, Homo sapiens
  misc_feature (401)..(401): n is a, c, g, or t
tttttttttttttttttctgtgaaaagacaaaaggaccaaactttatttctctacgcagccttggctggcctggaactcactatgtagaacaggttggccttgagctcacagagatcctcctgttgctgcctttagagtggctacctattggcaacaagcgccctcagcagagcactgatgagtcctcagagctcgtcggacgtgatgttcaccttgggtaggttacattctttactagtttgacagctctgaagaatgtcctggtagtggttcttcagatcctcatacaaggcaacagttttctgcgagtgagctaagggtaacaccttttcattcagcagcatttgtatctggaatttttcttgaggggtctgtgcgtcttcacaatggtaaagcacanatattaggtttgaagcatatggtacgatgtgaccacttcggaactcc

SEQ ID NO: 225 - DNA, 2528 bp, Homo sapiens
gagcccgcgctccactcctttcgtccttcccggtgactttccctccttgtccctggtccatctcgccagaggtcatagcaggcagagtggtgcagctacagcttgaagcagcagctgcggggttcgctgagccccccgggaggcgatcggagcgcggggagagcaggagtgcggccacgcgcccacctctaggtgcggggctcggagccgcccagcccgcgcgcgccctcctccctcctccctcctccctccgcccccgccgcacctccccctcctcccgctctgcttaggctgctccgcggcgcgcctcgcactcggagagccgcagcggcagcggcgcgtctcgcctttggagacagagccgggccgcggggacaccgagcagtcgccgcgaggacgccagggcgcgcgcagcactcgctttccctcggcctcggccgccactgctgagcagacaccatggcccgcggaaaagccaaggaggaaggcagctggaagaaattcatctggaactcggagaagaaggagtttttgggcaggaccggtggtagttggtttaagatccttctgttctacgtgatattctatggctgcctggccggcatcttcatcgggaccatccaagtgatgctgcttaccatcagtgagctgaaacccacgtaccaggaccgtgtggccccgccaggattgacacagattcctcagatccaaaagactgaaatttccttccgtcctaatgaccccaagagctacgaggcctatgtgctaaacatcatcaggttcctggaaaagtacaaagattcggcccagaaggacgacatgattttcgaggattgtggcagtatgcccagtgaacccaaggagcggggagagttcaatcatgaacgaggagagcgcaaggtgtgcaggttcaagcttgactggctggggaactgctctggtctcaatgatgaatcctacggctacaaagaggggaagccctgtatcattatcaagctcaaccgaatgctgggcttcaaacctaagcctcccaagaatgaatccttggagacttaccctctgacgatgaagtataatccaaacgtcctacctgtccagtgcactggcaagcgcgatgaggataaggataaagttggaaacatagagtactttgggatgggcggattctatggctttcctctgcagtactatccctactacggcaaactcctgcagcccaagtacctgcagcccctgctggccgtgcagttcaccaacctcaccttggacactgaaatccgcattgagtgtaaggcgtatggtgagaacattgggtacagtgagaaagaccgttttcagggacgctttgatgtaaaaattgaagttaagagctgatcacaagcacaaatctttcccactagccatttaataagttaaagaaaaagatacacaaacctactagtcttgaacaaactgtcatacgtatgggacctacacttaatctctatgctttacactagcttctgcatttaataggttagaatgtaaatttaaagtgtagcaatagcaacaaaatatttattctactgtaaatgacaaaagaaaaaaataaaaattgagccttgggacgtgcccatttttactgtaattagactccgtaactgacttgtagtgagcagtgttctggcccctaagtatcgccgccgtctgttttatttagtgtacagtactataggtgcgcactctggtcattttccaagccatgttttatcatatctgttttctactttccgtgagcgaggtttgctgtccaaggtgtaaatactcatgggaataaaactggcatggtactttcccttcctttctcattttcttggctctgagatttcaaaggtaacggcccatcaacaagcatttttaacacactccatagtctttccctgtggtatcaggtctttactattgtttttctttgtttcctggggctggggggtgggctgtcgtgggggaactgccctttaaattctaagtgacgctgcagaaaaacaacggtgatgggttgtgttgtgctccgtgctgagtgctgtctcgccatctctccccttgtcctccagtgtgctccgaagctgtgtctgatctggatctgcccgtcactttggctagtgatggggctagttaatttgcttagtacatttccttttccttctttcctttctctggaggcatcatgtgctggtgctgtgtctttatgaatgttttaaccattttcatggtggaagaattttatatttatgcagttgtacaattttatttttttctgcaagaaaaagtgtaatgtatgaaataaaccaaagtcacttgtttgaaaataaaatctttattttgaactttataaaaagcaatgcagtaccccatagactggtgttaaatgttgtctacagtgctaatccatgttctagcatatgtagtgattgccaggagtacagtgctcttgttggtcttgtgtcagtcaggttaacacaatggacaataaaagaatgaacacattc

SEQ ID NO: 226 - DNA, 740 bp, Homo sapiens
cggactcctagagacacgctagagcagataccacgatggcgccctttgcatctctggcctctggcatcctcttgttgctatcattgatagcttccagtaaagcctgtagctgtgccccaacccacccacagacagctttctgcaactcggacctggttataagggctaaattcatgggttccccagaaatcatcgagaccaccttataccagcgttatgagatcaagatgactaagatgctcaaaggattcgacgctgtgggaaatgccacaggtttccggttcgcctacaccccagccatggagagcctctgtggatatgtccacaagtcccagaaccgcagcgaggagtttctcatcgcgggccgtttaaggaacggaaatttgcacatcactgcctgcagcttcctggttccctggcataatctgagccctgctcagcaaaaggccttcgtaaagacctatagtgctggctgtggggtgtgcacagtgtttccctgttcagccatcccttgcaaactggagagtgacagtcattgcttgtggacagatcagatcctcatgggctctgagaagggctaccagagcgatcactttgcctgcctgccacggaatccagatttgtgcacctggcaataccttggggtctcgatgacccgaagccttcccctggcaaaagctgaagcctgaacactgtttacctttcctccatctttctttctcttaaatggtgaaataaag

SEQ ID NO: 227 - DNA, 1617 bp, Homo sapiens
gcgctgtaagaagcaacacctcctcctcgcctccgccatccacccggcagccgcgaagcagcaaccatgcgtgagtgtatctccatccacgtcggccaggctggtgtccagatcggcaatgcctgctgggagctctactgcctggaacatggcatccagcctgatggccagatgccaagcgacaagaccattgggggaggagatgactccttcaacaccttcttcagtgagacaggagctggcaagcacgtgccccgggcggtgttcgtagacctggaacccacagttattgatgaagttcgcactggcacctaccgccagctcttccacccagagcagctcatcacaggcaaggaagatgctgccaataactatgcccgtggccactacaccattggcaaggagatcattgaccttgtcttggacagaattcgcaagctggctgaccagtgcacgggtctccagggcttcttggttttccacagctttggtgggggaactggctctgggttcacctccctgctgatggagaggctctctgtcgactacggaaagaagtccaagctggagttctccatttacccagccccccaggtttccactgctgtggttgagccctacaattccatcctcaccacccacaccaccctggagcactctgattgtgccttcatggtagacaatgaggccatctatgacatctgtcgtagaaacctcgacattgagcgcccaacctacactaacttaaacaggttgataggtcaaattgtgtcttccatcactgcttccctcagatttgatggggccctgaatgttgatctgacagaattccagaccaacctggtgccctaccctcgcatccacttccctctggccacttatgcccctgtcatctctgctgagaaagcctaccatgaacagctttctgtagcagagatcaccaatgcctgctttgagccagccaaccagatggtgaaatgtgaccctcgccatggtaaatacatggcttgctgcctgctgtaccgtggtgatgtggtccccaaagatgtcaatgctgccattgccaccatcaagaccaagcgtaccatccagtttgtggactggtgccccactggcttcaaggttggcattaattaccagcctcccactgtggtccctggtggcgacctggccaaggtccagagagctgtgtgtatgctgagcaacaccacagccattgctgaggcctgggctcgcctggatcacaagtttgatctgatgtatgccaagcgtgcctttgtgcactggtacgtgggtgagggcatggaggagggagagttctctgaggcccgtgaggacatggctgccctagagaaggattatgaggaggttggtgtggattctgtggagggtgagggtgaggaagaaggagaggaatactaaattaaatgtcacaaggtgctgctttcacagggatgtttattctggtccaacatagaaagttgtgggctgatcagttaatttgtatgtggcaatgtgtgctttcatacagttactgactttaagtgtgaatgatttgtcagagacccgagccgtccacttcactgatgggttttaaataaaatactccctgtctta

SEQ ID NO: 228 - DNA, 1754 bp, Homo sapiens
cagtgcaagcgcgcaggcgcgaccggggggggggggcgggctgcgaggagaatctcagcgatcctcagttactgccgcatcctctgccggtcgtcatggctgcctacaagctggtgctgatccggcatggcgagagcgcctggaacctggagaaccgcttcagcggctggtacgatgccgacctgagcccagcgggccacgaggaggcgaagcgcggcgggcaggcgttgcgagatgctggctatgagtttgacatcgtcttcacctctgtgcagaagagagcaatccgcaccctctggacagtcctggatgccattgaccagatgtggttgccagtggtacggacctggcgtctcaatgagcgacactatgggggactaacaggtctcaataaagcagagactgctgctaagcatggtgaggcacaggtaaagatctggagacgatcttacgatgtcccgccacctccaatggagcctgatcatcccttctacagcaacatcagcaaggaccgcaggtacgcagaccttactgaggaccagctaccctcctgtgagagcctgaaggatactattgccagggcactgcccttctggaatgaagaaattgttccccagatcaaggaggggaaaggggtcttgattcctgcccatggcaacagctacgggggcattgtcaagcatctggagggtctgtcagaagaggccatcatggagctgaacctgccaactggtatacccatcgtctatgaactggacaagaacttgaagcccatcaagcccatgcagtctctgggagatgaagagacggtgcgtaaagccatggaagctgtggctgctcagggcaaggtgaagaagtgaaggcgaggaggcggactcctgccctgaacaccctctctccctgcttgttcctgcctcctgcaccctcccctgcacctgccacactgactacatctttaggatcttcagtttaagttgtagctgcagataggacctgtggctcccattctccttttagtattttatccccggcacccactccttcatagaatctagtcagaagaagacctctggggctgcaggctcttggtccatatccagggacggctccctgttacaggagagagttgagtagatagtaattatatcccccttagctctttgtttactaagggtctgcttaggaagaaggtcgggagggactgtatgtggtatgaccaatgaggagagaagctgtggtccagttttgtccctggaacctgtcctgcactcttcccacaattaggtaactgggggcctagtcattccagtggagagtgaaatgaacctcatgccgattaaaaagaccctactttctctctgaccctaaaggacgtcgtggccctagaaggttgggaacagtcttgtcaagtctatgtgtgttaacatttatttttacaaaaataaagtatatatacatatatcagcacaaaagcaacgaggttgctagtggcagttgagagtcctaagtggtcaccagaaaaaaagccattcctcagatcaaatgggataaactccttgtacctcttgctgtgttttggatccctttgccttgttttgtaagaggtgaagccccttgatcatgtccaaggttttgtctttcactgtctgaatcatgtttccagctgcttgaccctactgtgtgggttcagaactcgtttgggcataacaactaagtctctttccagtcagtataataaaggagtgatgtgcaat

SEQ ID NO: 229 - DNA, 1688 bp, Homo sapiens
cagaaggagtcatggctgccaaagtgtttgagtccatcggaaagttcggcctggccttagcagttgcaggaggcgtggtgaactctgctctatataacgtggatgccggacacagagctgtcatcttcgaccgattccgtggcgtgcaggacatcgtggtaggggaagggactcacttcctcatcccctgggtacagaagccaatcatctttgactgccgctctcgaccacgtaatgtgccggtcatcaccggcagcaaagacttgcagaatgtcaacatcacactacgtatcctcttccggccggtggccagccagcttcctcgtatctacaccagcattggcgaggactatgatgagcgggtgctgccatctatcaccacagagatcctcaagtcggtggtggctcgattcgatgctggagaattgattacccagcgagagctggtctccaggcaggtgagtgatgacctcacagagcgagcagcaacattcgggctcatcctggatgacgtgtccctgacacatctgaccttcgggaaggagttcacagaggcggtggaagccaaacaggtggctcagcaggaagcagagagagccagatttgtggtggaaaaggctgagcagcagaagaaggcggccatcatctctgctgagggtgactccaaagcggctgagctgatcgccaactcactggccaccgccggggatggcctgatcgagctgcgaaagctggaagctgctgaggacattgcttatcagctctcccgctctcggaacatcacctacctgccagcagggcagtccgtgctcctccagctcccccagtaaggccagccagccagggcctccatcgctctgaatgacgccttccttctgccccaccccagaaatcactgtgaaatttaatgattggcttaacatgaaggaaataaaggtaaaatcacttcatatctctaattatcaaatgaagcttttattgttacactttttgcccactttcataacaaaattgccaagtgcctatgcagactggccttccaccctgggtgctggcagtcggcggaagaaaggcagggcagtgtgtgtggtggacggggagccagctggcagcctgagtagaccttgagcctccattctgccatatattgaagatttacagacagtggtgcacacacgtgaaccaaaagcaagccctcaatttttccagccatacgaacccggacagatgcagctgaggagggcctgaggaagtggtctgtcttaactgtaaggccattccctcttaaccgtgaccagcggaagcaggtgtgtgcgtgcgactagggcatggagtgaagaatctgcccatcacggtgggtgggcctaattttgctgcccccaccagagacctaaactttggatagacttggatagaataagaggcctggactgagatgtgagtcctgtggaagacttcctgtccaccccccacattggtcctctcaaataccaatgggattccagcttgaaggattgcatctgccggggctgagcacacctgccaaggacacgtgcgcctgccttcccgctccctctcttcgagattgcccttccttcccaagggctgtgggccagagctccgaaggaagcaatcaaggaaagaaaacacaatgtaagctgctgtcaataaatgacacccagaccctc

SEQ ID NO: 230 - DNA, 652 bp, Homo sapiens
ccacaacaggatttattcaatgataacattcagttattcagacatcatagaacaacataaacataaacatcagtgttcataaaatatttaaaacttttgaaaatttattcccatgggaacatccctggagggaaaccggccattttctcctggaacactttatcaaaggcttcagcttgggctactgtgaagtgattcttccagtcattagttgtgccttttctcatgaaagtaaaaccagtaagaatcagttccttctccatgaggctataattggacatgttgttttctttcacgacttggaaggaactatacttgaggaccaaattcagctcatctggctctaattttttccccaggaagtcacatatcttctttatggatcccattgtatcctttttcatgtcttcatagtacagtaccaagaagttgtcccattctctcatagacagccagccacggatgtgctcaaaccatgatccatatgcaacatttcctttgaggaaccattcaacgtaagttcccagcgagtctggtttcttctccagggcgatcttactccagaaaaaataagcagaaacaagaacatctctgggaatttctgatgagatatatcaccttggccttggaactgaagagagacttggagaaa

SEQ ID NO: 231 - DNA, 1758 bp, Homo sapiens
agaccttatacatagtctgattagaccaggatcatggatactagtgtccttctcctccttgctgtcctcctcagcttcttgctattcctggtcagaggccatgcaaaagttcatggtcatcttccaccaggaccccgtcccttacccctcttgggaaacctcttgcagatggacagaggaggctttcgtaagtctttcattcagcttcaagaaaaacacggagatgtgttcacagtatactttggacctaggcctgtggtcatgctgtgtgggacacagaccataagggaggctctggtggaccatgctgaggctttctctggccggggaataattgctgtgcttcagccaattatgcaggaatacggtgtgtcctttgttaatgaagaaaggtggaagatccttcggcgattatttgtagccaccatgagagactttgggataggaaagcagagtgtggaggatcagataaaggaggaggccaaatgtttagtggaggaactgaagaatcatcagggagtctccctggacccaacgttcctcttccagtgcgtcacaggcaacataatctgctccattgtctttggagagcgctttgactacagagaccgccagttcctgcgcttgctcgacctgttgtataggaccttttccctcataagctcattctccagccagatgtttgaggtctactctgacttcctgaagtactttcctggtgtccacagagaaatctacaaaaacctgaaggaagtcctcgactacattgatcatagtgtggagaaccacagggccactttggaccccaatgctccccgagactttatcgatactttccttctgcacatggagaaggagaagttgaaccactacacggagttccatcattggaacctaatgatatctgtgctctttcttttccttgctggcactgagtctacaagcaacactctctgctatggattcctgctcatgctcaagtaccctcatgttgcagagaaagtccaaaaggagattgatcaggtgatcggctcacagcgggtcccaacccttgatgaccgctccaaaatgccatacactgaggcagtcatccatgagattcagagattttctgatgtttctccaatgggtttgccatgcagaatcaccaaagacacattgttccgagggtacctgctccccaagaacactgaggtgtacttcatcctgagttcagctctccatgacccacagtactttgaacaaccagacaccttcaatcctgagcacttcctggatgccaatggggcactgaagaaatgtgaagctttcatgcccttctccataggaaagcgtatgtgtcttggagaaggcattgcccgaagtgaattgttccttttcttcactaccatcctccagaactactcagtgtccagccctgtggatcctaacaccattgatatgactcccaaggagagtggattagccaaagtagccccagtgtacaagatttgctttgtagcccgctgattgtgctgaggcagtcagccgactcacttctgttcaaaatggccccatttttctgattctgggagacctgctggagaccaggcccaaggttgctgagtcattcctcacttcttcccaacagcctcagtccccatttatcaggtctccatgctctgtgatctatgctattggactatgtataaggtctgaattctatgtctacaggtttgcctagtatgtatggttcatgtaaacaggatcatatagtgc

SEQ ID NO: 232 - DNA, 580 bp, Homo sapiens
ccaggttgtcccacacttgatagtttatcacagattataattgcagttctgttacctgatttgatctttcacagaaagccatcaagtcaagcagggaagcagttagtcctacttacaaaggaagaagcaccccacagaccactaaagagacggatgacctacagccccaggcccacccattcaacaggcctagctcattcccaagcccagacatcaaggcatgggacacccacgcatggcagcttcgtgtccagctttattagggacagcatgtttaggtgaggtctggggagggataaaggcatgagaatatactttccccttatagcaaccttcggaggcagcaggatagatggccagacacatctggaacatggaggtctcacggctcaagagttggtgttgttagttggtcctcagggccagactcccagaggccagtgaacttatcagtgaacttgctccagtagcctttcagggatttgaagcgattgtccatccagcccctggccaccacagctatatcagactcctgcatgctgcttagtgcatcctggaccgtcttggaggcttgttccat

SEQ ID NO: 233 - DNA, 680 bp, Homo sapiens
gaggggcttgttctttcacctcagcggccgacctggaaaagcctagaaagtgctccccttttcttccgcctccggctacccgcatcggccgcctgcgcggagtcctggccaccaatcggcgcgcgcgctggagtggccgccttctctcacgctaaggggctgagtgcgcctgcgcgctgcgctgtcttttcacgtgtcctgagccggcccacgggagtctccttgcagcaggagtccgagtgcagagtccggagctgcggcggcgtaagtcatggctggacaagcttttaggaagtttcttccgctatttgacagagtattggttgaaaggagtgccgctgaaactgtgaccaaaggtggcattatgcttccagaaaagtctcaaggaaaagtattgcaagcaacggtcgtggctgtgggatcaggcgggaaaggaaagggtggagagattcagcctgtcagtgtgaaagttggagataaagttcttctcccagaacacggaggcaccaaagtagtactagacgacaaggattacttcttatttagagatggcgacattcttggaaagtatgtcgactgaaatcactgttgaaatggtgtcacatgaagctgcccattccactgatattctgaactatttcatcatgtaaataatttccatgcctcccttttataataaa

SEQ ID NO: 234 - DNA, 680 bp, Homo sapiens; identical to SEQ ID NO: 233

SEQ ID NO: 235 - DNA, 1889 bp, Homo sapiens
gctttatctgctaagctccgctcagttcagcatgctgcgcgccgcactcagcaccgcccgccgtgggccacgcctgagccgcctgctgtccgccgccgccaccagcgcggtgccagcccccaaccagcagcccgaggtcttctgcaaccagatcttcattaacaatgagtggcatgatgctgtcagcaagaaaacattccccaccgtcaacccttccacgggggaggtcatctgccaggtagccgaagggaacaaggaggacgtagacaaggcagtgaaggccgctcaggcagccttccagctgggctcgccctggcgccgcatggatgcatctgacaggggccggctgttgtaccgattggctgatctcatcgaacgggaccggacctacctggcggccttggagaccctggacaacggcaagccttatgtcatctcctacctggtggatttggacatggttctgaaatgtctccgctattatgctggctgggctgacaagtaccacgggaaaaccattcccatcgatggcgacttcttcagctacacccgccacgagcctgtgggcgtgtgtggacagatcattccgtggaacttcccgctcctgatgcaagcctggaagctgggccctgccttggcaactggaaacgtggtggtgatgaaagtggccgagcagacaccgctcactgcactctacgtggccaacttgatcaaggaggcaggcttcccccctggtgtggtcaatattgttcctggattcggccctaccgccggggctgccatcgcgtcccacgaggatgtggacaaagtggccttcacaggttccactgaggttggtcacctaatccaggttgccgccgggagcagcaatctcaagagagtaaccctggaactggggggaaagagccccaatatcatcatgtcagacgctgacatggactgggctgtggaacaggcccactttgccctgttcttcaaccagggccagtgctgttgtgcgggctcccggaccttcgtgcaggaggatgtgtatgatgaattcgtggaacgcagtgtggcccgggccaagtctcgggtggtcgggaaccctttcgacagccggacggagcaggggccgcaggtggatgagactcagtttaagaagatcctgggctatatcaagtcaggacaacaagaaggggcgaagctgctgtgcggtgggggcgccgccgcagaccgtggttacttcatccagcccaccgtgttcggagacgtcaaagatggcatgaccatcgccaaggaggagatcttcggaccagtgatgcagatcctcaaattcaagaccattgaggaggttgtggggcgagccaataattccaagtacgggctggctgccgctgtcttcacaaaggacctggacaaggccaattacctgtcccaagctctgcaggctgggactgtgtggatcaactgctacgatgtgtttggggcccagtccccatttggtggctataagatgtcggggagcggcagggagctgggcgagtatggcctgcaggcctacacggaagtgaagacggtcaccgtcaaagtgccacagaagaactcgtaaagtggcgtgcaggcttcctcagccagcgcccaaaaacccaacaagatcctgagaaaagccaccaccaagcacactgcgcctgccaagagaaaaccccttcaccaaagcgtcttgggccaagaaagtcaggatttgataaacagggcagggttggtgggcggtgtgtggggagcatcccagtaaactggggaagggaggagctctgtgcagactaccacgcgcacgcacacacgctcactgggtccttctgtgctggatgctggttccaccctcagtgcttaaacaaatgagcaataaa

SEQ ID NO: 236 - DNA, 4198 bp, Homo sapiens
agagctcagtgactccagcagccacgatgactgcggatgagttggtcttctttgtgaatggcaaaaaggtggtggagaaaaatgcggaccctgaaacaacacttctggtctacctgagaagaaagttggggctatgtgggaccaagcttggctgtggagaaggtggctgtggggcatgcaccgtgatgatctccaagtatgaccgtcttcagaacaagattgttcatttttctgtcaatgcctgcttggctcccatctgctccttgcaccatgttgctgtgaccaccgtggaaggcataggaaacacccagaagctgcatcctgtacaggagagaattgccagaagccatggttcccagtgtgggttctgcactcctggcattgtcatgagtatgtacacactgctccggaaccagcctgagcctactgttgaggagatcgagaatgccttccaaggaaacctctgtcgctgtacaggctacagacccatcctccagggattccggacctttgccaaggatggtgggtgctgtggagggagtggaaacaacccaaactgctgtatgaaccagacgaaagaccaaacggtttctctctcaccttctttattcaacccagaggatttcaaacctttagatcccacgcaagagcccatcttccccccagagttgctgaggctgaaagacactccccagaagaagctgcgttttgaaggggaacgtgtgacctggatccaggcttcaactatggaggagctgcttgacctgaaagctcagcaccctgatgccaagctggtggtgggaaacacagagataggcattgaaatgaaatttaagaatatgctatttcctctgatcgtctgcccagcctggatccctgaactgaattcagtggtgcatgggcctgagggaatctccttcggagcttcttgcccccttagcttggtggaaagtgtcctggcggaggagattgctaaacttccagagcaaaagacagaggtgttcagaggcgtgatggagcagctgcgctggtttgccggcaagcaggtcaagtccgtggcgtccatcggagggaacatcatcactgccagccccatctctgacctcaaccctgtgttcatggccagtggagccaagctgactctggtgtctagaggtaccaggagaactgttcggatggatcataccttcttccctggctacagaaagactctgctcagaccagaggagatattgctgtccatcgagatcccctatagcaaggagggagagtttttctcagccttcaagcaggcctccaggagggaagatgacattgccaaggtgactagtggcatgagagtcctgttcaaaccggggaccattgaagtgcaggaactgtccctttgcttcggagggatggccgacagaactatctcagccctcaagaccactccgaagcagctatcgaagtcctggaatgaggagctgctgcagagcgtgtgtgccggcttggcagaggagctgcagctggcccccgatgcccctggtggtatggtggaattccggcgcaccctcaccctcagcttcttcttcaagttctacctgacagtgctccagaagctgggcagagcggaccttgaggatatgtgtggtaaactggaccccacctttgccagtgccaccctgctctttcagaaggaccctccagctaatgtccagcttttccaagaggtgccaaaggatcagtctgaggaggacatggtgggccggcccctgcctcacctggcggcaaacatgcaggcatcgggagaggccgtgtactgtgatgacattccccgctatgagaatgagctctctctcaggctggtcaccagcacccgggcgcatgctaaaatcacgtccatcgacacttcagaagccaagaaggtgccagggtttgtttgcttcctcaccgcagaggatgtccctaatagtaatgcaaccggccttttcaatgatgaaactgtctttgcgaaggatgaggttacttgtgttgggcacatcattggtgctgtggtcgctgacaccccagaacacgcacagagagctgcgagaggggtgaaaatcacctatgaagatcttccagccattatcacaatccaggatgctataaacaacaactccttttatggctctgagataaaaattgagaaaggagatctcaagaaaggcttttcagaagctgacaatgttgtctcaggagagttgtatatcggtggccaggagcacttctacctggagaccaactgcaccattgccgtgccaaaaggcgaggcaggcgagatggagctgttcgtgagcacacagaacaccatgaaaacccagagctttgttgcaaaaatgttgggcgttccggacaacagaatcgtagtccgagtgaagaggatgggtggaggctttggagggaaggagacccggagcactgtggtgtccacagcactggccttggctgcacacaagactggccggcccgtacgttgcatgttggaccgagatgaggacatgctgataactggtggcagacatcccttcctggctaaatacaaggttggcttcatgaagactgggactgtagtggctctcgaggtggctcacttcagcaatggtggtaacactgaggatctctctcggagtataatggaacgagctttgttccacatggataacgcctataagatccccaacattcgaggcactgggaggatttgcaagactaatctgccctccaacacagccttcagaggttttgggggtcctcaggggatgctaatcgcagaatactggatgagcgaggtcgccataacctgtgggctgcctgcagaggaggtacggaggaaaaacatgtacaaagaaggggacctgactcacttcaaccagaagctggaggggttcaccttgcccaggtgctgggatgaatgcatcgccagctctcagtatcttgctcgcaagagggaagtggagaaattcaacagggagaattgttggaaaaagagagggctgtgtataatcccaactaagtttggaataagctttacacttccttttctgaaccagggaggcgctctggttcacgtgtacactgatggttcggtgctgttgacccatggagggactgagatgggccaaggccttcacaccaagatggttcaggtggccagcagagctctgaaaatccccacctccaagattcatataagtgagacaagcactaacaccgtccccaacacttctcccacagctgcctctgccagtgctgacctcaatggacagggtgtttatgaagcatgccagaccatactgaaaaggctggaacctttcaagaagaagaaacccaccggcccctgggaggcatgggtgatggacgcctatacgagcgcagtgagtttgtccgcaactggattttataagacacccaaccttggctacagctttgagacaaactccggaaatcccttccactatttcagttatggggtggcttgctctgaagtagaaattgactgcttaacaggggatcataagaatctccgtacggatatcgtcatggatgttggttccagcttgaatcctgccattgatattggacaagtagagggggcatttgtccagggccttggtctcttcactatggaggagctgcactactcccctgaggggagcctgcatactcgtggccccagtacctacaaaatccctgcatttggtagcatccccattgagttcagagtatccctactccgggactgccccaacaagagggccatctatgcatccaaggctgttggggagccacctcttttcctggcttcctctatcttctttgccatcaaagatgccattcgtgcagctcgagctcagcacggagataacgcaaaacaacttttccagctagacagccctgccactccggagaagatccgaaacgcctgtgtggaccagttcaccaccctgtgtgtcactggagtaccagaaaactgtaaatcctggtctgtgaggatctgaagagaaggtctccaccattggtttgtaccgcaccaggattccttggagccacaagcacatcctgtagtatccagatttccgcatgccgcgtgggactcagcaggatgacattttcaggaagatggacattttgacccaaataagagctgcaaacaaaccaataagcaaatggggag

SEQ ID NO: 237 - DNA, 370 bp, Homo sapiens
caagtcaagtttttttattttattgtcagttacatgctttatagaaaaaagtgtggagaaccggtcagggttgtacaaaaaaaggctaggttcctacgttgttttatttacaccattgtgaggacgcccccacttcaggcgcagcagctgcacttgtccgaagcctctttgcagatgcagccctgggagcacttcgcacagcccacggggcagcaggaacagcagcttttcttgcaggaggtgcatttgcattgtttgcatttgcaggagccagcgcaggagcaggatccatctgtggcacaggagcagttggggtccatggcgaatggaggcggcagttggagatcaacgagagatcgctcctcgtgcc

SEQ ID NO: 238 - DNA, 650 bp, Homo sapiens
ttcaagcacatgatttgtcttgatttaatgcctttttaagtgccctcaaaaactgaggggaaaataaattcactcaaaattattttaaattctttttaatcccctcaatttagagtccaagggctgaaggacttataatcatgattcccctttagatataaatttataaattgcacttgcctctgttaagtgtttcttttgtggggaaaatattatattaatttttactgttgcatgcagaggtaaccctttacccacatagaggcatttcttccatagagcctttgagttcaaaccattttttccctagttttcttttattttcctttttaagattttcaaactgggttacacactggaaaaggctgggttaagggccaaaatttaataaatctgtacggataactaaaggctacagagatttttatatatatatatatataattttttttaacttttagaaatcagagtgcttataaaatggctggctcatggctctgtccccagcccctctgacgccgcctcctagccttcgttgttgagataaccaggaatagtgactccatgcgtaaacaacaagaatactaaccaagaaaactagcttatcatgcaaatattaaggcatctagaaagtcagttaaaatttattg

SEQ ID NO: 239 - DNA, 463 bp, Homo sapiens
ctgctcgctgtcgaaatgggcaagtttatgaaacccgggaaagtggtgctggtcctggctggacgctactccggacgcaaagccgtcatcgtaaagaacattgatgatggcacctccgaccgcccttacagccatgccctggtggctggaattgaccgctatcccagaaaagtgacagctgccatgggcaagaagaagatcgccaagcgatccaagatcaagtcctttgtgaaagtttataactacaaccacctcatgcccacaaggtactctgtggatatccccttggacaaaactgttgtcaacaaggatgtgttcagagacccagcactgaaacgcaaggccaggcgggaggccaaggtcaagtttgaggagcgatacaagacagggaagaacaaatggtttttccagaagcttcgcttttagatgtatttttgttttcgtcattaaaaaaataaaaaat

SEQ ID NO: 240 - DNA, 3564 bp, Homo sapiens
cgctgagtagatcactgttaagtttgagacttgtttcaaactaaaaaatgatgagggatatagcccagtagtaaagttacatgcctagatttctcagtgagtgccttggagcatgactcagtggtggagccctgcctagaatccccagtgagggcctgggttcttgcttgcacccgcctgtgtgctccgtgctccgtgagccccgctgtgagcgagacacgtgaccgtcagtaatcatgaagaatccatttgcgcaccttgccgagcccttggaccctgcacagccaggaaagaaattcttcaacttgaataaattggaggactcaagatatggacgcttaccgttctctatcagagttctcctggaggccgccgttcggaactgtgacgagtttttggtgaagaagaatgacattgagaatatcctgaactggagtatcatgcagcataagagcatagaagtgccgtttaagccagcccgagtcatactgcaggactttacgggcgtgcctgctgtggttgattttgcagcaatgcgcgatgctgtgaagaagttgggaggaaatccagagaaaataaaccctgtctgccccgctgaccttgtaatcgatcattccatccaggttcatttcaacagaagggcagacagtttgcagaagaatcaagacctggaatttgaaaggaatagagaacgatttgaatttttaaagtggggttcccaggccttttgcaacatgaggattattcctcctggctcaggaattattcaccaagtgaatctggagtatttggcaagagtagtgtttgatcaggatggatgttactacccagatagcctcgtgggcacagattctcacaccaccatgattgatggtctgggagttcttggttggggtgtaggtggtattgaagcagaagctgtcatgctgggtcagccaatcagcatggtgcttccccaggtgattggctacaagctgatggggaagcctcaccctctggtaacctccacggacattgtgctcaccattaccaagcacctccgacaagttggggtcgtgggcaaattcgtggagtttttcgggccaggagtggcccagctgtccattgctgaccgagctacgattgccaacatgtgcccagagtacggcgcgacggcagccttcttcccggtcgacgacgttagcatcgcgtacctggtgcagacaggtcgtgaggaagacaaagtaaagcacattaaaaggtatcttcaggctgtaggcatgtttcgagacttcagtgactcctctcaagacccagacttcactcaggtcgtggagttagatttgaaaacagttgtgccttgctgcagtggacctaaaagacctcaggacaaagttgctgtgtctgagattgaaaaggactttgaaagctgccttggagccaagcaaggatttaaaggttttcaagttgctccagaccatcacaatgaccacaagacgtttatctataacgacagtgaattcactcttgctcatggctccgtggtgatcgccgccatcactagctgcacaaacaccagcaatccgtccgtgatgttaggcgcaggattgttagcaaagaaagccgtagaggctggcctgaatgtgaagccttacgtcaaaaccagcctgtctcctgggagtggagtggtcacctactaccttcgagagagtggagtcatgccttacctgtcccagttagggtttgacgtggtgggctacggctgcatgacctgcatcggcaacagtggacccctccccgaacctgtggtggaggctatcacccagggagaccttgtggctgttggggtactgtctggaaacaggaattttgaaggacgagtccatcctaacacccgggccaactacttagcatctcccccactagtaatagcatatgcaattgcaggcaccgtcaggatcgacttcgagaaagagcctttgggagtgaacgcacagggccaacaagtgtttctgaaggatatctggccaactcgagatgagatccaggaggtggagcggaagtatgtcatccccggcatgttcaaggaggtctatcagaagatagagactgtaaacaaaagctggaatgccttagcagccccttcagagaagctgtatgcgtggaaccccaagtctacttatatcaagtcaccgccattctttgaaagcttgactttagatctccagccccccaagtctatagtggatgcctatgtgctactaaatctaggagattccgtaacaacggaccatatctctccagcggggaacattgcaagaaacagccctgccgctcgctacttgacgaacagaggcctgacgccacgagatttcaactcctacggctcccgccggggtaacgacgccatcatggcacgggggacatttgccaacattcgcttgctgaacaagtttctgaacaagcaggcccctcagactgtccaccttccttcaggagaaaccctcgatgtgttcgatgccgctgagcggtaccagcaggctggacttcccctgattgttctggctggcaaagagtacggttcaggcagctcccgagactgggcagccaaaggtcctttcctgctgggaatcaaagctgtcctggcagagagctacgagcgcactcactgcagcaacctggttggcatgggggtgatcccccttgagtatctccccggcgaaactgcagactctctgggactcacgggtcgggaaaggtacacgatccacattcccgaacaccttaagccccgcatgaaggttcagataaagctggacaccgggaagaccttccaggccgtgatgaggttcgacaccgacgtggagctcacttacttccacaatggaggcatcctgaactacatgatccgaaagatggcccagtaggtgctggcctctcaggagacccgcgcttggtgctagacccaatgaggtaccaggcctccgctggtggaggcctgcgagcagccacctctacttctcgtgagggtgctagcaagatgagcaagtgggccctgccattcctggaggctcagcggcaggagtctctagttcggtgatttgttaatcttttatccttttctgtaatccggaatctagaatcatgggaaggtccatagtcccaaagagagctaccttctctttaaagtcactcatcaccggtcattgatttttttcactctgactaatcttcagcagaactagccagtatctcagaagtgtctcctaccctttctgttactctgtctgtctgtgctcagtgacacccttccctggagagcccattcctccgtgtatcacaccagtgttaacgacatagcttcagactctgtcacacttcaaattcatagtaatctgtgtgatcccttccttccaagtgagcgaagaccttgtggcatggctggccgtcccaagtgtttgattacctaccttccaatcaccgtgagttgtcttttaccattttcaacatttgttgacagggtttgaaagtaaccggggagcgagacaggatttctaattgaataagattaaatatattttcatg

SEQ ID NO: 241 - DNA, 3275 bp, Homo sapiens
cccagggtccgatcgcgtttggtgcctgaaggaggaaccggtgacagacctggagactacagttctctgtccttcacacagctctttcaccatgcctgggtcacttcctttgaatgcagaggcttgctggccaaaagatgtgggaatcgttgcccttgaaatctactttccttctcagtatgttgatcaagctgagttggaaaaatacgatggtgtagatgctggaaagtataccattggcctgggccaggccaggatgggcttctgcacggatcgcgaagacatcaactctctctgcctgactgtggttcagaaactgatggagagaaatagcctttcctatgactgcattgggcggctggaagtcgggacagagacaatcatcgacaaatcaaaatccgtgaagtctaatttgatgcagctgtttgaggagtctgggaatacagatatagaaggaatagatacaactaatgcatgctatgggggcacagccgcagtcttcaatgctgtgaactggatcgaatccagctcttgggatggacgatacgctttggtagttgcaggagacatcgctatatatgcctcaggaaacgccaggcctacaggtggagttggagctgtggctctgctaattgggccaaatgctcctgtaatttttgaccgagggcttcgtgggacacacatgcagcatgcctacgacttttacaagcctgacatgctctctgaataccctgtggtagatggaaaactctccatacagtgctacctcagcgcattggaccgctgctattctgtctaccgcaaaaagatccgggcccagtggcagaaagagggaaaggataaagattttaccctgaatgattttggcttcatgatctttcactcgccatactgtaaactggtgcagaaatctctagctaggatgttcctgaatgactttcttaacgatcaaaacagagacaaaaacagtatttacagtgggctggaagcctttggggatgtgaaattagaagatacttacttcgacagagatgtggaaaaggcatttatgaaggctagtgctgagctattcaaccagaaaacaaaggcatctttgcttgtatcgaatcaaaatggaaacatgtacacatcctctgtatacggttcccttgcttctgttctggcacagtactcacctcaacagttggccgggaagaggattggagtgttctcttacggttctggcttggctgccacactctactcccttaaagtcacacaagatgccacaccaggatctgctcttgacaaaataacagcaagtttatgtgaccttaagtcaaggcttgactcaagaacgtgtgtggcaccagacgtctttgctgaaaacatgaagctcagagaggacacacatcacttagccaactatattccccagtgttcaatagattcactcttcgaaggaacatggtatctagtcagagtggatgaaaagcacagaagaacttacgcccggcgtccctccacaaatgaccacagtttggatgaaggagtgggacttgtgcattcaaacacagctacagagcatattccaagcccggctaagaaagtgccaagacttcctgcgacctcgggcgaacctgagtcggctgtcatcagtaacggggagcactgagagccgtggccttcacagaggctcggggctggatggggtatgggaaacgttagaggaatggatgtcttgggacaattttacagattacgtgttgcttaaaaatgtaatgtaactgacacagagcccagaaaactgttgtgtttttggagaagtctcgctgagctcctaacacacttcctgctgtgggctggccaatggtgaatgtactgcgatggtgttaagggctctgcagaacgtcatacctcgctgcatgtttacacgcatgcgggttaggcttcaaactcggtctgaactgagtgcttctgactgcaaaggcagaggtactgctgtccagtttaaaaaattgttttttttttttttaatgtgtaagaatttttatacttaaataaaaaaaagtacctgtagcttttgggggaaaaaaaaaaacctttttctaggttggggattgtggaatttaaatgttacacataaactctgcttaatggcaaggcaaacatttatctttttcgaagatttataaatcctgaagagaaaaaaagagggtatggttctaggatctggatgaaccatcagtgagaaaggttagtcataatcaagtgagcagaaggatgctggcgttgagcaggcctctgtcacagcaaccagggctctgtgggcacagctgagggaactttctggccaggtgcccgtgactgctgctcagctgcactgagatgcagtggagctgctgcacggaagcttgctgtggtgctgaacgccttacctgcggataaagtgtaaagtaggagggatgggcagggcactattaggttacagtgttacagacccaggttatagacttgacagctcaaactcaccagacacctttttccctttgtggtttgtgtattttttgtgttttgtttgtttttttttatattgttcaatttaaaaaatttagaaaattttaaccttacgttttcacatagtgtgattagccaaaaggaatttcacttcaagatctagaaatagaattcataacattttttcctaaactttgacttttaaaacaacgaaaattaccacatgagatgaacaagaaaattcattagaaagttctctgggtgatttttggtgctgaactgacatgagcctcatagactgtaaaacagaggtagttgaaactaatgtacagaactacattttttaattttatttgcatttaattctgtgaagtttcagttatctaaaataaacacataaacgtgtaatgtttcagattgcaaggtgagatgtaatgtagcatttgtaagatattcttgtcaatattaactggtaggattttgatttgtacagttttaattggttaaaatgatctcattttaacatccactgctatagatgaatgatgtaagctcagatttaatgaatggtggggaaatggtgcatgtaattttttcgcaagtatcgagagttctgtatgttttgaaaagaataatttaacgtttgggttgccaggaagggggctttcccagagtccattgccaggcgttgggcaagcctcgcaatgttggcacggagcgttaaccacaccttactaatagcaaggggaataactttgaaataaagttttagacaaata

SEQ ID NO: 242 - DNA, 597 bp, Homo sapiens
gcgtgtatatcaaagcagtttattgacctccagtagcacagctctgctttactcgagggtgtggcaagcgtacaaaatgcaaggttccaggtgatccataggcatggctatctgctgaccaatggaatgccctcattcacgaaagggcagccggtagcttacaaaggtcacttaggtgccctgggcccagccactgtgtacttaattatcaaggggtgtgtccaccttgccagctcctcactcatactgcaggagagagaagaatggcacaggtcccagcttctccctgcccttcagggaggtcagctccaccaggctcacacactccaccacctcagcccgcagctggctcagcagctcacaggctgcacacatggttcctccagtggccaggagatcatccacaatgaccactttctgccccggttctaaggcatctttctggatttccagctcagccttcccatactctagagaataggaggctgatacagtggggcctggtagcttcccgcgcttacggatgagcacacagcccacccccagctcctgagcaagggaagggccaaacaggaagcccctggagtccagacctgc

SEQ ID NO: 243 - DNA, 2307 bp, Homo sapiens
gccgccgcctcacctctgctgccagtagcctcgccgtcggggagccctagcgcagcgtccgccctcagcatgatggacttggaattgccaccgccaggactacagtcccagcaggacatggatttgattgacatcctttggaggcaagacatagatcttggggtaagtcgagaagtgtttgactttagtcagcgacagaaggattatgagctggaaaaacagaaaaaactcgaaaaggagagacaagagcaactccagaaggaacaggagaaggcctttttcgctcagttacaactggatgaagagaccggagaattcctcccaattcagccagcccagcacatccagacagacaccagtggatctgtcagctactcccaggttgcccacattcccaaacaagatgccttgtactttgaagactgtatgcagcttttggcagagacattcccatttgtagatgaccatgagtcgcttgccctggatattcccagccacgttgagagctcagtcttcaccacccctgatcaggctcagtcactcgatagctctctggagacggccatgactgatttaagcagcatacagcaggacatggagcaagtttggcaggagctattttccattcccgagttacagtgtcttaatacggaaaacaagcagcaggctgagactaccactgtccccagcccagaggccacactgacagagatggacagcaattaccatttttactcatcgatcccctcactggaaaaagaagtggacagctgtagtccacatttccttcatggttttgaggattcttttagcagcatcctctccacggatgatgccagccagctgaactccttagactcaaatcccaccttgaacacagatttcggtgatgaattttactctgctttcctagcagagcccagtggcggtggcagcatgccttcctctgctgccattagtcagtcgctctctgaacttctgggcgggcccattgagggctgtgatctgtccctgtgtaaagctttcaaccagaagcacactgaaggcacggtggagttcaatgactctgactccggcatttcactgaacacaagtcccagccgagcatccccagagcactctgtggagtcttccatttacggagacccaccgcctgggttcagtgactcggaaatggaagagctagacagtgcccctggaagtgtcaaacagaatggacctaaagcacagccaacacattcttctggggatacagtacagcctctgtcgccagctcaagggcacagtgctgctgtgcacgaatcccagtgtgaaaatacaacaaaaaaagaagtacctgtgagtcctggtcatcaaaaagtcccattcacaaaagacaaacattcaagccgattagaggctcatctcacaagagatgagcttagggcaaaagctctccatattccattccctgttgaaaaaatcattaatctccctgttgatgacttcaatgaaatgatgtccaaggagcaattcaacgaagctcagcttgcattaattcgagatatacgcaggagagggaagaataaagttgccgctcagaactgtaggaaaaggaagctggaaaacattgtagagctggagcaagacttgggccacttaaaagacgagagagaaaaactactcagagaaaagggagaaaacgacagaaacctccatcttctgaaaagaaaactcagcactttgtatctggaagtcttcagcatgttacgtgatgaggatgggaaaccttactctcccagtgagtactctctgcagcagaccagagatggcaacgtgttccttgttcccaagagcaagaagccagatacaaagaaaaactaggttcgggaggatggagccttttctgagctagtgtttgttttgtacggctaaaacttcctactgtgatgtgaaatgcagaaacactttataagtaactatgcagaattatagccaaagctagtgtagaaataatatgaaactttacaaagcattaaagtctcaatgttgaatcagtttcattttaactctcaagttaatttcttgggcaccatttgggctagtttctgtgtaagtgtaaatactacagaacttatttatactgttctcatttgttacagtcatagacttatatgacatctggctaaaagcaaactattgaaaactaaccaaaccactatacttttttatatactgtatgaacaagaaatgacatttttatattaaattgtttagctctgataaaaattaaaaggagctagcactaataaaggaatatcatgactt

SEQ ID NO: 244 - DNA, 2307 bp, Homo sapiens; identical to SEQ ID NO: 243

SEQ ID NO: 245 - DNA, 3504 bp, Homo sapiens; identical to SEQ ID NO: 212

SEQ ID NO: 246 - DNA, 1139 bp, Homo sapiens
gatgctccctctgctgcgctgcgtgccccgcgccctgggtgccgccgccacgggcctccgagcctccatcccggccccgccgcttcggcatttactgcagcccgcgccccggccatgcctccggcccttcggtttgctcagcgtacgagccggctccgctcggcgctctggcctcctgcagcccccggttccctgcgcgtgcggctgcggcgctctgcacacggaaggagacaaggcctttgttgaatttttgactgatgaaattaaggaagaaaagaagatccagaagcataagtcccttcccaaaatgtctggagattgggagctggaagtgaacggcacggaggctaaattattgcgcaaagttgccggagaaaagatcactgtcactttcaacattaacaatagcatccctccaacctttgatggtgaagaggagccctcacaggggcagaaggccgaagagcaggagccagaactgacatcaactcccaattttgtggttgaagttacaaagactgatggcaagaagacccttgtactggactgccactatcctgaggacgagatcggacacgaagatgaggccgagagtgacattttctctattaaggaagtgagctttcagaccactggtgactctgagtggagggatacaaactacacactcaacacagactccctggactgggccttgtatgaccacctaatggatttccttgcggaccgaggggtggataacacttttgcagatgagttggtggagctcagcacagccctggagcaccaggaatatatcacctttcttgaggacctcaaaagctttgtcaagagtcagtagaactgtgagactgaaggcctcaatctaaacggccagctctggtgggcgagcaaaagctgccttgacatcacaactatgctttgaaatggctgtcatcctaatatatgggggaaagcaagtttaaattatcgccgttacacctccatttactattcctttgggctcttttcctgtacacatctattatttgtagatttttgtatgacatgatgatgaacaataaatctgacttcatctcctccaggaaaaaaaaaaaaaaaaaaaaaaaaaaaaaaaaaaaaaaaaaaaaaaaaaaaaa

SEQ ID NO: 247 - DNA, 539 bp, Homo sapiens
tttttttttttcctacttttgctttattcaaagacaggtgcaagggagtgaagaagggcctggtcagaaggcaagaccgacaggaagtggcttaacggtacttggaagtcaacacagtgctcacagaggcaaagaatttgtccagagaggcgtgcatggcgggtgtgaaatccccagggtggtggctagccaaggtcaccagcaggcagtggctcaggaacttgaagttgacaggatccacacgcagtttgtgggcatgcaggtcgctcagagtggacagggcaccaggcaggtcatcgaggtggcttgcagcattggtcagggcatcagcaaccttcttgccgtgagccttgacctggtcggagccctcacttgtattaaagtgagggaagtaggtcttggaggaggggaagacaatgaacaacctccctatggtctctgcgccaatttcagcagcatggttaccaatcttcacccaggctttcttgatgttgtttttgtcttcttcagagagcaccatgattgcttcccctcgtgcc

SEQ ID NO: 248 - DNA, 1296 bp, Homo sapiens; identical to SEQ ID NO: 220

SEQ ID NO: 249 - DNA, 2874 bp, Homo sapiens
gtccaggcctgcaagctctgatcttctgtgctcccgccgctctcgcctcagcccgccgccatgtaccgccgtctgggcgaagtgctgctactgtcccgcgccgggcccgctgccctgggctctgcggctgcagactcagccgcactgctgggctgggctcgcggacaaccctctgctgtcccgcaacccgggctcacgccggtcgccaggcgccactacagcgaagcggccaccgaccgcgaagacgaccccaacttcttcaagatggtggagggcttcttcgaccgcggcgccagcatcgtggaggacaagctggtggaagacctgaagacccgggagaacgaggagcagaagcggaaccgagtgcgcggcatcctgcggatcatcaagccttgcaaccatgtgttgagcctctccttccccatccggcgcgacgacggctcctgggaggtcatcgaaggctaccgggcccagcacagccagcaccgcacgccctgcaagggaggtatccggtacagcactgacgtgagtgtggatgaggtgaaggcgctggcgtccctaatgacctacaagtgtgcagtggttgatgtgccatttggaggtgctaaagcaggcgttaagatcaatcccaagaactatacagataatgaattagaaaagattacacgaagattcaccatggagctggcaaagaagggttttattggtcctggcattgatgtgcctgccccagacatgagcacgggcgagcgggagatgtcctggatcgctgacacctatgccagcaccatagggcactatgatatcaatgcacacgcctgtgtcactggtaaacccatcagccaaggaggcatccacggacgcatctccgctactggccggggtgtttttcatgggattgagaacttcatcaatgaagcttcctacatgagcatcttagggatgaccccggggcttggcgataagacgtttgttgttcagggatttggtaatgtgggcctgcactctatgagatatttacatcgttttggtgctaagtgtgttggtgttggagaatctgatgggagtatatggaatccagatggtattgacccaaaagaactggaagatttcaagttgcaacatggatcaattctgggcttccccaaagccaaggtctatgaaggaagcatcttggaggctgactgcgacattttaattcctgcagccagcgagaagcagttgaccaaatccaatgcacccagagtcaaagccaagatcattgctgaaggagccaatggcccaaccactccagaggccgataagattttcctagaaagaaacatcatggttattccagatctctacctgaatgctggaggagtgacagtatcttactttgagtggctaaagaatctaaatcacgtcagctatggccgattgaccttcaaatatgaaagggactcgaactaccacttgctcatgtccgttcaagagagtttagagagaaagtttggaaagcacggcgggactatccctgtggtccccacagcagagttccaggacagaatatcgggtgcatctgagaaagacatcgtgcactctggcttggcctacacaatggagcgatctgccaggcaaattatgcgcacagccatgaagtataacctgggattggacctgagaacagctgcctacgtcaatgccattgagaaagtcttcaaggtgtacaatgaggctggcgtgaccttcacatagacaggtcacagctgacttctttaccaccctcttcacctataatttctgcagacctgtcacaagtttacatgtaaccacagaaatctgttcttgtgactcattagttaatggacactgttctcaacaagtcagttggaatcagccccttaagagaaagattaagttagcggatcatgtaccagctgatggtgtaaaggtaggaatcacgtgtatcctgccagttaggtgtttcgcttttaagtaaagtttctgctcctggccatgctgccttgctctggactcttcccaacagggttagtgctgttgccagggaaggcagtcaagagtcagtcacttcctgacaagtctgggtacttgagcacataagaagtaggcgtgtggcatttgcaaaggtggcatggtcttcgagtgagttattgctgctttacatcagcaaaataactcagtctctaagtcgcaaacaaataaaagctatttctcatgtattttattctttcagaataaaccagttcatgctgctgtaataaaattgccttcaaccacttaagcctaacctttactcaagcagtgaacgcctaaaatataggaaatggaagaagctagtttttataacataaaacagtataatttagcttatcggccctgcagcatagtccagcagaaataaagtagcacctgggggcaggcgtacctgcaagtgacacgggagggacacttgggaacttgttatgcagtccagagagtgaagtaaccactttaccaatttggagatctattatgttgagtaattgaaccatacttcaaatagagtgtcccagaagaaaagactggctccctgtttggaggctggcagacttcagactcagcctgtgtgtcccttctccaaggctttgccgtctacacagcacctcgctatccacaggctggagactgcctggggttgacttctgtttggggagttactggccagggcttttgaacaggagtgttccacagaagtaccagacattatttatataagaatgagcgcttctttttaacagtaccctttcagaaatttctaactactttgtaactgcatgattaacttggtgataaaagcagttattaaaagtctaccttttccaaaaaaaaaaa

SEQ ID NO: 250 - DNA, 1740 bp, Homo sapiens
tggaacacgggttggggcggcagctgaagacgccaacttaaaagcgccgtagccagaacccaggcagcagtgtgtccattgtccagaactcatctgagaaactgccacaggaagtgctgctctgctccagtctggtcactgaaaagggagctccaggacctgcaggatgggggcaggctgtgtcaaagtcaccaagtacttcctcttcctcttcaatctgctgttctttatcctgggtgctgtgatcctgggctttggggtgtggattcttgcagacaagagcagcttcatttccgtcctacaaacctcatccagctcgctgcaggtgggggcatacgtcttcattggtgtgggcgccatcaccatgctgatgggcttcctgggctgtattggtgctgtaaacgaggtccgctgcctgctgggtctgtacttcgtctttcttctgctgattcttatagcacaggtgactgtagaggtcctcttctacttcaatgctaacaagctgaagcaggagatggggaacacagtgatggacattattcagaactacagcgtcaatgccagcagcagccgcgaggaggcttgggactatgtgcaggcgcaggtgaagtgctgtggctgggtcagcccctccaactggacacgtaacccggtgctcaagaactctaccaagaccacttacccatgctcctgtgagaagacgaaggaggaggacaaccagctcattgtgaagaaagggttctgtgagtctgacaacagcaccgcaagtgaaaacagtcctgaggactggcctgtgcacccggaggggtgcatggagaaggctcaggcgtggctacaggagaacttcggcatccttctgggcgtgtgtgctggtgttgctgtcattgagctgctggggttgttcctgtccatatgtttgtgccggtacattcattctgaagattacagcaaggtccccaagtactgaggctgctgatgtccccactgtcctgtgtttctccaccctcagtctcccacagggcctctagagctttcccacatgagccgtgctccatctactactgaggcctctggcccaccctgggaaggttgtaggaactttctgggcctgggcccttctccctgcctttctgccaccaatatggggcccttactgtcctgtagctcttcctcctactgcctggaatatttttaacagcttgaaatggctcccagtattactgtacacaggatagctgggtccccaccctgaagtcatattataacaatataatattaaaaaccagggagggctagcacccatggctgcccagggaaaggccacaggaaaggttagtggtttccccactgtgacactttctttatgggttttcaatgtttctgtgggagacagggtaggcagttcttgtacacacttggaatactccccccaagctcagttcagcagggaactgaacggagaggctgcctgggggactggcccaggtagcccccagtgagcttttccttggtgagggacctgacagcttaggggcatgggtccctcaggtctggcataagaccctgagttgtctggacaagagaaggaggatctggactggtatttcttggcagctgtcccctgtcccctgggctaagggtgggtgaggctgtgccttgcagggtgggggagggtttccatatgctcatctctgaaatcaactattaaaggaggatttgtaacaaaaaaaaaaaaaaaaa

SEQ ID NO: 251 - DNA, 542 bp, Homo sapiens
cactcaaaattcttcagtttttacaaaactaacagggtggagtagggaagggagcagggaggcagccgcaggggtgggtaggcggagaggcaggctatgcttctgtcttcacctgagcctggttgcctgccacattgttcggctcacccttcatctcagcatcagtgggatggtctcctgcagccacttctgtcttggccttatgttcctcctcagccagcctctcaaacatgttggcatagagcttcttttcccgggcaagctgcctgcgggtccgctgctggcacacagccagctgggtcttggcggctttgttgctgggatagagctgcaggaccttttggaagtcagctcgtgccaggtcaaagtcattcacggccaggtgtgcctctccccggcgaaacaggcccttctcattgttgctgtccagctccaaggccttgttacagctttcgatggcagctgagaaggcctgcagtttcaggtgacacatggccagattgagatgtgaggccagtcggagcgcatggaccttttgcatt

SEQ ID NO: 252 - DNA, 829 bp, Homo sapiens
gttcacttccagccgccttacaagtctctccagtcgccagcctccgggaccactctccttgccgccttcgcgtccctaggaccagccagcccgccggtcttcgcggttagctccatactccggatcagccatgacctctcagattcgtcagaattattccaccgaagtggaagctgccgtgaaccgcctggtcaacttgcacctgcgggcctcttacacctacctctctctgggcttcttttttgatcgggatgacgtggctttggaaggcgtaggccacttcttccgcgaattggccgaggagaagcgcgagggcgccgagcgtctcctcaagttgcagaacgaacgcgggggccgtgcactcttccaggatgtgcagaagccatctcaagatgagtggggtaaaaccctggaggccatgaaggctgccttggccctggagaagaacctgaaccaggccctcttggatctgcacgccctgggctctgcgcaggcagaccctcacctctgtgacttcttggaaagccacttcctggataaggaggtgaagctcatcaagaagatgggcaaccacctgaccaacctccgtaggtggcagggcccacaaccagcgcagactggcgtggcccaggcatctctgggcgagtatctctttgagcgcctcactctgaagcacgactaggcctctgtgccttccaaggggctgccctcttctgctctgcaccgaccgcctcagcacctccaccgaatgaacctctaaagccactaggcagctttgtaaccgccctggagcctctcccaagtcttggacccaagtaaaaataaagct

SEQ ID NO: 253 - DNA, 829 bp, Homo sapiens; identical to SEQ ID NO: 252

SEQ ID NO: 254 - DNA, 2793 bp, Homo sapiens
acagccgagaatgggagtagggcggagtgtttgagcagcacacccatttcctctccgctcttcgtctcgttctcgtggcctgtccacccatccatcatctgccggccaccgctctgaacaccttccaccatggccacctcagcaagttcccacttgaacaaaggcatcaagcagatgtacatgaacctgccccagggcgagaagatccaactcatgtatatctgggttgatggtaccggggaagggctacgctgcaagacccgtactctggactgtgaccccaagtgtgtagaagagttacccgagtggaactttgatggttctagtacgtttcagtctgaaggctccaacagcgacatgtacctccatcctgtggccatgtttcgagaccccttccgcagagaccccaacaagctggtgttctgcgaagtattcaagtataaccggaagcccgcagagaccaacctgaggcacagctgtaagcgtataatggacatggtgagcagccagcgcccctggtttggaatggaacaggagtatactctcatgggaacagacggccaccctttcggctggccttctaatggcttccctggaccccaaggaccctattactgcggtgtgggagctgacaaggcttatggccgagatatcgtggaggctcactaccgggcctgcttgtatgctggaatcaagatcacagggacaaatgccgaggttatgcctgcccagtgggaattccagataggaccctgcgaagggatccgcatgggagatcatctctgggtagcccgttttatcttgcatcgggtatgcgaagactttggggtgatagcaacctttgaccccaagcccattccagggaactggaatggggcaggctgccacaccaactttagcaccaaggccatgcgggaggagaatggtctgaggtgcattgaggaggccattgataaactgagcaagaggcaccagtaccacatccgtgcctacgaccccaaggggggcctggacaacgcccgccgtctgactggattccacgaaacctccaacatcaacgacttttccgctggcgttgccaaccgcagcgccagtatccgcattccccggattgtcggccaggagaagaagggttactttgaagaccgtcggccttctgccaattgcgacccctatgcggtgacggaagccatcgtccgcacgtgtctcctcaacgaaactggcgacgagcccttccaatacaagaactaagcggactcgacttccagtgatcttgagcccttcctagttcaccccactcccaactgttccctctcccactggtccccactgtaactcaaaaggatggaataccaaggtctttttattccttgcgcccagttaatttttgcctttattggtcagaatagaggggtcaggttcttaatctctacacacccaaccccttctttcctagctagctttccagtgggggaacgggagggggtggggaagggtaacccaccgcttcatctcagcgggaatgcatgtcctgtaggcatagctgtcacaaatcgggtgtacttgtggtgagggaggactggttttttttttccttcaggataattgaaagggcaggcccaacagcttagattaacattttctctgtcagtagagagctgttatttcttccggtgaaaccagctttctattgaagtctggtgaggagttggaggttggtctcttggcttccttagcttagggaaggggagttcaccctcccttcatgaaacacagttcacctgacaaatggccctactgtaaaggaagaaaaaagtttcttggtcctccatttataactcaaagcagagtagtatttttatatttaaatgttaaaaacaaaaaagttatatatatgggtgtgtggatatatatgtcttttctaattgagaaaaccatcctattccctgggtgccaagtttgagtgaggagctcggtgtagaagtgaggcactcttgaggtaggggtggggatgcagtactgggaaagttggttatcttgggggttcagcttcattactacttagggtttccctgcccactctgcaggagcagatgttggacaggtagccagtgggatgccactgcttgccgccactgtccctgggcttagtttaaggggacgtgtatacctaatccacacacgagttagaagtatgagttggctggtcaacttgaacattgttacaggcgggtgggtgttagtggggggttattttttggtgggactagcatgtcactaaagcgggccttttgatatattaaattttttaaagcaaaacaagtttagattttaatcaagttcgtagggtttctaactttacagaattgcctgtttgtttcaatgactccttccacttggctcttaggggaactgaggacaggcctggagttaatacacttgtcattctgtgtcctagtgtcctcttcctccggcagactgtccccttccttctgaaaaagccgatagagtcttgttttatttttcttttataataaacacaccccacctccatcccagcttgttgccttgcagttttctggatgtttgtgtcggcagcaggcagctgtggtttttttctcttgccacgatgactctaattaccatgtatagtatgttcagttagataactcactgtaaacagactgtaactgagagcagagcttgtaaatcaacctaacgtttataagatttcctctgacttgtttctttgtggttccaaaaaaaaaaaaaaaaaaaaaaacctcaaaaact

SEQ ID NO: 255 - DNA, 2874 bp, Homo sapiens; identical to SEQ ID NO: 249

SEQ ID NO: 256 - DNA, 1524 bp, Homo sapiens
cgcagcctcgcgctcgcttctggggcctggggacaccgccgcgccctgcgaggcagcggtcttcccgcctgccttccctccgtggctccggcgctgcccggtcccctcgggcggcagctgccatgggcaccgacagccgcgcggccggagcacttctggcgcgggccagcaccctgcacctgcagaccgggaacctgctcaactggggccgcctgcggaaaaagtgtccgtccacgcacagcgaggagcttcgagactgtatccaaaagaccttgaatgaatggagctcccaaatcagccctgatttggtcagggagtttccagatgttttggaatgtaccatgtcccatgcagtggaaaagataaaccctgatgaaagagaagaaatgaaagtttctgctaaactgttcattgtaggatcgaattcttcatcatcaactagaaatgcagttgacatggcatgctcagtccttggagttgcacagctggactctgtcatcatggcttcccctccaattgaagatggagttaatctttccttggagcatttgcagccttactgggaggaattagaaaacttagttcagagcaagaagattgttgctataggcacctcggatctagacaaaacacagttggagcagctgtaccagtgggcacaggtaaaacccaatagtaatcaagttaatcttgcctcctgctgtgtgatgccaccagatttgactgcatttgctaaacagtttgacatacagctactgactcacaatgacccaaaagaactgctctctgaggcaagtttccaggaagctcttcaagaaagcatccctgacattgaagcccaggagtgggtgccactgtggctgctgaggtactcggtcatcgtgaaaagcagaggaatcatcaagtcaaaaggatacattttgcaagccaaaagaaagggttcttaactacagctcaagctcacaactcaggggccttgtatttatctggaacataagataaaaattcatgataaaattgagatgtgtaaaaaaaaatctagctctcgcctacaaaaagcgtcactgaggcgtgaatgtggtggtttggcaatgtgttgagtttgagtacctccctggcgtctgcagcagcgcactcacaggaagcattgtattctcttcattaaactcttggtttctaactgaaatcgtctataaagaaaaatacttgcaatatatttcctttatttttatgagtaatagaaatcaagaaaatttgttttaagatatattttggcttaggcatcagggtgatgtatatacatattttttatttctaaaattcagtaactgcttcttactctatacttctataactaagcaattacattacagttgttaagacatactggaagagatttttttcctgttgttgacaaaataatctatctcagagtaactatagcagtctactagtaatgtaaataaaattgattctttgatccatgaaaaaaaaaaaaaaaaaaaaaaaaaaaaaaaaaaaaaa

SEQ ID NO: 257 - DNA, 2009 bp, Homo sapiens
ccggtgatggccggcagacagtctggttggagccaggcggctcttctccagttccttcttggcatgtgcctaatggtgatgccacccatacaagcccggagtctgcgctttgttaccttgctgtatcgacacggagatcggtcaccagtgaaggcatatcctaaggacccctatcaggaagagaaatggccccagggatttggtcagctaaccaaggaagggatgctacagcattgggagctgggccaggccctgcggcaacgctaccatggctttctgaacgcctcttaccacaggcaagaggtttacgtgcgaagcacagactttgaccgtactctcatgagtgcagaggccaacctggccggactcttccctcccactgaagttcagcacttcaacccgaacatttcatggcagcctatccctgtccacaccgtgcccattactgaagacaggttgctgaagtttcctttgggtccatgtccccgttatgagcagttgcagaacgagactcggcagacaccagagtatcagaacatgagtattcagaatgcacaatttctggacatggtggccaatgagacagggcttatgaacttgaccctagagaccatctggaatgtgtatgacacactcttttgtgagcaaacacatgggctgctcctgccaccctgggcctctccccaaaccgtgcaggctctgagccagctaaaggacttcagcttcctcttcctcttcgggatccacgatcaagtacagaaggcccggcttcaggggggagttctgctggctcaaatattgaagaatctgaccctaatggcaactacctctcaattccctaagcttctggtttattctgcgcatgacactaccctggttgctctgcaaatggcactgaatgtctacaatggtaaacaagccccctatgcttcctgccacatatttgaactgtaccaggaagataatgggaatttctcagtcgagatgtactttcggaatgacagtaagaaggcaccctggccactgaccctgcctggctgtcctcaccgttgcccactgcaggacttccttcgcctcacagaacctgtcatacccaaggactggcagaaggagtgccagctagcaagcgatactgcagacacagaggtgattgtggcactggctgtctgtggctccatcctcttccttctaatagtgttgctcctcactgtcctcttccggatgcaggcccagcctcctggctaccaccatgttgcagacagggaagaccatgcttgacaaccactcagtccccttccctctgcctcctaggggatgtgggctgagtccttgctcctgactattgccgatcccagagggacaggtttagccttcctgattacctacgcccaaatgaatgagtgaggctgggctggtcgcacgtcacctgtgacttaccatcctcatgcctgatgtttaccatgtactgtgttggacactggctttctctaaatgggatttgcctcttctatactccctaaggacttgagatacagacaagcattcaggttttactcaagaccttgggattaaaaaaacaaaacaacaacagaaaaaaaaccccaaaccctgaagaagctggtacttgatctgtctagctcttcccccaagccttgctctttgtcttctagcccatatctttggcaaatggcttggagacattgtcccttggtacttttgcagttcatataaatggctcattttatatggatcacccaacagcaaagtttccctctgactgaggcctgccgtcagtgtcaacctcaggcaggttgaaggacactggtgctgcacctggatgacagtgggaggacacaggagtgaaacacatggaatcatgacgtgactctccctcagctgggctggactcttcagggacttgaagtaaatgcagctggtgaactgtacaccttgactgtggcccgaaacagagctgaagtaactccgaggaaatgaaggttttgactgag

SEQ ID NO: 258 - DNA, 387 bp, Homo sapiens
catatatagctgtgttcagacacatcagaagagagcatcagatctcattacatatggttgtgagccaccatgtggttgctgggatttgaaccaggacctctgtaagagaagtcagtgctcttaacactgagccatctctccagcatttgttttgttttaaaacaatgaccataagaggaatggtggacttctagcttgttctgcctacagtaacaaaagcacatcacacccccagctcacaaacctgtgtgcaatgtcactaccaccacacaacggtactgcgttacactgttggaaaccgcatttccactcagtgcagataaaagcaataggaaacacccagcccagagtcagattattttctgttgtgaagtcaggcctcgtgcc

SEQ ID NO: 259 - DNA, 625 bp, Homo sapiens
agaaatgacaccacagggtggactttattttaaagctcacaaggtgttcacaatgatcacatgatccacacgtctcccgtgtcacacctccacgggacagtgcatgtatggtgatagttacagccctgcttcgcatgctgctacggttcactagctgttgtattcttggtaataataaagcaaatcactctactggacagacttaatttggaaagcccttatgcagatcagactcagtctcatatgaacaaccccggccacacatgcggaaatgaagagcaaatgcagaagaacacagaaaaccccttggcaagaacagctgctgcagactgagcccagcgctgtcagtgcagttcacgtcctcagaagacaaacgacctccctcctcagcatatgagcagcaatactgtacagagctcagtggggtcccaactccacaggagcctgtcaccaaagtcactctcatttagggtcagagactacagactcaagctttttcttttttccctcataatacacaaaatgtctagacagtctttaaaaaaaaaaaaaaaggaagaaagaaaatataaatagactcagtctgtcatacagaatcacatacaatggcaaacacatttcatga

SEQ ID NO: 260 - DNA, 2524 bp, Homo sapiens; identical to SEQ ID NO: 206

SEQ ID NO: 261 - DNA, 472 bp, Homo sapiens
aaggcaaggtctctgtcattagggctgggagagatggtacagatcaagccaaacagtgaaaaataaggcaaactgtagcttcgggttttgagcctggcaccaggaaggcctcttcttgaggaagagggggcaggcagtggcaaatcagcagacgagatgcaaatggagtaacaatcacagttagtggggtaacgagatcaggcggtaaacccttaaagcaacacccaaggtccacgtctttgcatgtgcagggcacaactccagcagcagtttctgggtttgggggtttgttacttttccgactttccccaccccctaaaagacacgaagacgagctcatgaagagatcaaggaagggacgtcttctggctgcgctgggcaagggttgggtgacttccgggagcacttgtctaccttccctgtggctggccgagtcctacaaacgtttgtaggtgcccaggagcgctttgca

SEQ ID NO: 262 - DNA, 413 bp, Homo sapiens
ttattaaaaaaaaaagttttattttggtttacgtttccagagggatgaatccatcaaggcagggaggcgggacagcagggggcaggcacagaagcaacaggaagttgaaaattcacatcttcaaacacaagaaggaagcagaaagggggggtgaggagaaagcagtgtttgatatttcctacacacacatgtcaacattcaccgttcttagaccactgagtcaggctctgacatccttctgagcctcacaagggaatggttttgccattcccatgaggccatgcactgaggtactaaacatggctgtggccatgtcaacaacatagccccactctggacctcactctagacactgtaaagaggacaggaggaccccatgcatgtaactatggggaaagctatcattcgcgctg

SEQ ID NO: 263 - DNA, 2582 bp, Homo sapiens
cagcaggggccctccttcatgaatgttccgggaagcagcgtctgtgcagggtaggttggccaggctgcaggtgccagagcagattgcataaaaggttaggggccggtgggaaaggggtgtagccagatccagcactggagtttcagtctggacagcaagtcaagtagccacccagagtgaactggaaagggcttttggccacgggctttccatgacaatggagggtccccagctctgcttagtcctcttggtcttaggcctctcctccggaggtgtgagcgcaactccagtgcttgaggcccggccccaggtctcttgctctctggagggagtagagatcaaaggcggctccttccaacttctccaagacggtcaggccctggagtacctgtgtccctctggcttctacccataccctgtgcagactcgaacctgcaaatccacaggctcctggagtgtcctccagacccgggaccaaaagattgtcaagaaggcagaatgcagagcaatacgctgcccacgaccacaggactttgaaaatggggagttctggccccggtccccctactacaacctgagtgatcagatttcttttcaatgctatgatggctacactctccggggctctgctaatcgcacctgccaagagaatggccggtgggatgggcaaacagcaatctgtgatgatggagcgggatactgtcccaacccgggtattcctattgggacaaggaaggtgggaagccagtaccgtcttgaagacactgtcacttaccactgtagtcggggacttgtcctacgtggctcccagcagcgaaggtgccaggaaggtggctcgtggagtgggacagagccttcctgccaagattccttcatgtacgacagccctcaagaggtggccgaagcatttctatcctccctgacagagaccatcgaaggagcagatgcggaggatgggcacagcccaggggaacagcagaagaggaagattatcctggacccctcgggctccatgaatatctacatggtgctggatggatccgacagcatcggggccagcaacttcacaggggccaagcggtgtctcgccaacttgattgagaaggtggcgagttatggggtgaagccaagatacggtctagtgacatatgccacagtccccaaagtcttggtcagagtgtctgaggagaggagtagtgatgccgactgggtcacagagaagctcaaccaaatcagttatgaagaccacaagctgaagtcagggaccaacaccaagaaggctctccaggctgtatacagcatgatgagctggccaggggatgctccgcctgaaggctggaatcgaacccgccacgtcatcatcatcatgactgatggcttgcacaacatgggtggagaccctgtcactgtcattgaggacatccgagacttgctggatattggcagggatcgcaaaaatccccgggaggattatttggatgtgtatgtgtttggggtcgggcctctggtggaccctgtgaacatcaatgccttggcttccaaaaagaacaatgagcagcatgtgttcaaggtcaaggacatggaggatctggagaacgtcttctacaaaatgatcgatgaaaccaaatctctgggtctctgtggcatggtgtgggagcatcagaaaggcggtgattattacaagcaaccatggcaagccaagatctcagtcactcgtcctctgaaaggacatgagaactgtatgggggccgtggtgtccgagtacttcgtgctgacagcagcgcattgcttcacagtggaagatcagaaacactccatcaaggtcaacgtggaggggaaaaggcgggacctggagattgaagaggtcctgttccaccctaattacgacatcaatgggaaaaaggcagaaggaatctctgagttctatgactatgatgttgccctcatcaagctcaagaccaagctgaagtacagccagactctcaggcccatctgtctcccctgcacagagggaaccacccgagccttgcggcttcctcagacagccacctgcaaacagcacaaggaagagttgctccctatgaaggacgtcaaagctctgtttgtatccgaggaagggaagaagctgacccggaaggaggtgtacatcaagaatggggaaaagaaagccagttgtgagagagatgctacaaaggcccaaggctatgagaaggtcaaagttgcctctgaggtggtcacccccaggttcctgtgcaccggaggggtagatccctatgctgaccccaacacatgcaaaggagactccgggggccctctcattgttcacaagagaagccgcttcattcaagttggtgtgatcagctggggagtagtggatgtctgcaaagacccgaggcggcaacagttggtgccctcctatgcccgggacttccacatcaatctcttccaggtgctgccctggctaaaggagaagctcaaagacgaggacttgggtttcttataaggagcttcctgctgggagggtgagggcagattaaagcagctacaatacaaaaaaaaaaaaaaaaaaaaaaaaaaaaaaa

SEQ ID NO: 264 - DNA, 496 bp, Homo sapiens
ttatttttgcaggggacatgtatatattgttaattttaaaatagccaggatccagtttgaaaatatgccacatttaaaatgagactgaatgtctaggtgtaaactatcgcaattagtcttgacgcccataagattcaacaaaacactttacataccaaaattctgaaatatgctaaaactgttttcacatttgcctatttttcttttgaattatacaagatgccttaaggaacggcttgcctggagtagagagctgaagaaaagtcctacacgtacaagtatggaaattaaattctggtattcactaatgctctctgttacagaaaaacatttctaatgcactaacattttcattgcaaatcatggcaagatatattcaggcttcagacaagcctcttggttaaacagttttacaggataacgaggcaaatattttaacaaccattaggaggcttatccataaacagatggctcttattcgtcctacgatataagc

SEQ ID NO: 265 - DNA, 559 bp, Homo sapiens
  misc_feature (550)..(550): n is a, c, g, or t
ttctttctctctttctttctcttaaccttttaacatagttgttttgccagcaatgggtcctgtaattcaagtgaaaatggaaattcatgtttttgttcgttcctttgtgtgtatgcagggttggatggattctggggattggactagaagccttgtttgtacacgccaggcaagtgctttaccactgagccagcagctcctggcctctctcgtttttaggtttcttataaaagcgtgtttatctctagagaacatcggcaacaatgaagagaaaagaaagtgtgtctatgtcctaagaagtgattcagatcaattaactgagaggcttcccgaccccgcctgtattttatagtctctgccaacaaggctgctatctgggccccagctcccatcttgtgctctgtttattttggcttcccagagattaggtctcagtcaccaagctttctatgaccttctgttgttttcccttgcttattttacatgtgcctggttccaaagagcctggccaggaggtgtgtttccctgtgggaaggttttggactatggngctggccat

SEQ ID NO: 266 - DNA, 454 bp, Homo sapiens
ttgagttctttagactttaccaaatgtattttccatttgttagtttttaaagtagcttcaactgatgttgcacacaccatagctctgtacacttatgcagttagcctgtctcagaaagcgaataaaccgcaggtaacatctcccccagaactcctcgggaaacataattaggctgtacaaacacatcacaaattcaacagcacacggtgcacccgaaaccttttctatgaacctcaaaagttctttggacgtaatcactgaacattggtgtcgagcaaagatcagatttcgagcctccaattttgtgctgtgttgtgtcagcgacaagagcgccatccaagtcctttaagcaacgaagacatgcgcagaaccagttcagaaatcgtcaaatttgacgacaaaacagaaggatggctgcctactcccttcctcagcacgaaccctgttacgttct

SEQ ID NO: 267 - DNA, 401 bp, Homo sapiens
ttagactaagacaatgctccggctttaatgtatgaaaataatacccatgttgtctaatttgggggtcatacattagaagtgtaaaggtctgcgtctgcccgccgtctagttgaagtacgtgagcacaatcatttggatcggctgtctgcacacggggcagggcttattcctcttctttagcttctttgcacacgtgaaacatgacatcaggtgtccggttttgccgtgaacaatgcaaccatttttaggccgcccctggcaaatcacacatggctcgatggcgttcagagagaagctggattccatactttcctctttgtcttgtgtgtcctccttcaactctttgccactttcttggctgctgtaaacaatgctactggaagtcgacggctgggaatagt

SEQ ID NO: 268 - DNA, 486 bp, Homo sapiens
  misc_feature (468)..(468): n is a, c, g, or t
ttccacatagataactttaggttaactacaaaaatcatgaaatgaagaacagatcatgggactgcacactcaagcatcactggagtgacacacaggtttccccagatgactgctaagagggaaaaaaggaaccaggatacaacaaactcatatttaagtagtaaacatgtcagatattttaaaataataaatacagaatagcaggagagaaactaaaatcataaaacagcatggagtatattttattttctttaagacagatgaaatttctaggcacagttttaggcattaaggaggacacagaggcataggttagtgtgtgctgctctgtacaaaaatacagtctgaataaattacattgctagccatacaattagacaatcacttatcagtcaattcactgcatgtttaataatatacaggtacatgcgaatccatatatatcatttatatttcaaacacataagnctctctatatttggtttt

SEQ ID NO: 269 - DNA, 543 bp, Homo sapiens
ttagagagcatcagccgttctatttcttgcatgatcattggcatgaaggaaaagtccaaaacaggggctttgcattctggggattgcgggccaagtgttataagctcctcatagcactttgcctgggttcatgagacctcggggatccagtgtgtctttgagttgcctcatggtctccacacccacaggacccacttcctcttgaagcagctgcctcttgcccagaccgatgccatgttctccagtacatgtcccatggagtgccagggcacgcctgcccagattttctgcaaaggccttgaccctcctctgctcctccacatcatctgggttgaccaacaggatgcagtgaaagttgccgtcacccacatgcccaacaatgactcctgtgagttttgaggccttaagctcctccttggtctctaccaagatctctggcaaccgggagatgggcacacacacgtccgtggaataggccttacttcctggacgcagggccaaagctgcataccaagcattgtgccgtgcagcccaaagttcatt

SEQ ID NO: 270 - DNA, 528 bp, Homo sapiens
ttcctttttctttttttcagagctggggaccgaacccagggccttgcgcttcctaggcaagcgctctaccactgagctaaatccccaacccctcacacctgcttttaaacaagtgaaccagctttgctaagggcttaccagtcaagacattgctccctgctcctcactgttgatacccggtgttcctgaggatggagggactccaaaccagtgggagttttgtctgatagggtaacaggaatagtctctgctggtgggaaacttccagaaagggggagttcaaagcaaggcagaagtttctgctattttttgtttgttgcttttcttttagaggcagggtctcatttagccaaggctgacctccaactccctaagtataagtagtcaaggatgaccatgaacttctgatcctcttgcctctactgcttgagggttgggattacaggcatatgtcactgcctgtaccgtgtatctggtactgagattggactctgggcttcatgcatactagagaagcactcttaacaa

SEQ ID NO: 271 - DNA, 1442 bp, Homo sapiens
aattccctggggcgccctcttttaaaaatggagtcccaaatacagagaagatttcatcaccatggtctccctgtgtcaaagagctcttgttcttccgccatgtggctctgtgctctggtctgggcttctcttgctgtttgcccaatttggggacacccatcctcaccaccagtggtggacaccacaaaaggcaaagtcctggggaagtatgtcagcttagaaggatttacacagcctgtggccgtcttcctgggagtcccttttgccaagcctcctcttggatctctgaggtttgctccaccagagcctgcagagccctggagcttcgtgaagaacaccaccacctacccgcctatgtgctcccaagatggagttgtgggaaagttactcgcagatatgttgagcaccggaaaagagagtatacctctcgagttttccgaagactgtctctacctgaatatttacagtcctgctgacttgacaaaaaacagccgattgcccgtgatggtgtggatccatggaggtggactaataataggcggagcatcaccctatagtggactagctctctctgcccacgaaaacgtggtggtggtaaccattcaataccgcctgggtatttggggattgtttagcaccggtgatgaacacagccgggggaactgggctcacttggaccagctggctgcactacgctgggtccaggataacattgcaaactttggagggaacccggattcagtgaccatctttggagagtcagcaggaggtgtcagtgtctctgctcttgtcttatctcctctggccaagaacctcttccacagagccatttctgagagtggtgtgctcctcactacaaacctggacaagaagaatactcaggctgtggctcaaatgattgctactctttctgggtgtaataacacctcatcagccgccatggttcagtgcttgcgccagaagacagaggctgagctcttggagcttacagtgaaactggacaatacctccatgtccactgtgattgatggagtggtactgccaaagacaccggaagagatcctgactgagaagagtttcaacacggtcccctacatagtgggcttcaacaagcaagagtttggctggatcattccaacgatgatgggaaatctactctctgaaggcagaatgaatgagaaaatggccagttctttcttgaagaggttcagccctaaccttaacatctctgagagtgtgattccagcaatcattgagaagtacttaagaggaacagatgaccctgccaaaaagaacgaacttctcctggacatgttttcagatgtctttttcggtatcccagctgtactcatgtcccgtagcctcagagatgccggagcgcccacctacatgtatgagtttcagtatcgcccaagcttcgtgtctgaccagagaccccagac

SEQ ID NO: 272 - DNA, 1715 bp, Homo sapiens
gacaagcttttccggtctccatggctgccctggcggttctacacggcgtcgtccgcaggcctctgctccgcgggctgctgcaggaagtaagatgcctgggacgaagttatgcatccaaacccactttgaatgatgtggttatagtgagtgctacacgaactcccattggatccttcctgggcagccttgcctctcagccagccaccaagcttggtactattgcaattcagggagccattgaaaaggcagggattccaaaagaagaagtgaaggaggtctacatgggcaacgtcatccaagggggagaaggacaggccccgaccaggcaagctacactgggtgcaggtctacccattgccactccgtgcaccacagtaaacaaggtgtgtgcctcaggaatgaaagccatcatgatggcctctcaaagtcttatgtgtggacaccaggatgtgatggtggcaggcggaatggagaccatgtcaaatgtcccgtacgtaatgagcagaggagcaacaccatacggtggggtaaaacttgaagacctgattgtgaaagacgggctaaccgatgtctacaataaaattcatatgggcaattgtgctgagaacaccgcgaagaagctgagtatctcgcgggaggagcaggataagtacgccatcggctcttacacccgaagtaaagaggcgtgggatgcagggaagtttgcaaatgagattacgcccatcaccatctcagtgaaaggtaaaccagacgtggtggtgaaggaagatgaagagtacaagcgagttgacttcagtaaagtgccaaagctcaagacagtgttccagaaagaaaacggcacagtaacagctgctaacgccagcacactgaacgacggagcagctgctgtggttctcatgactgcagaggcagcccagcggctcaaggttaagccactggcacgaatcgcagcatttgctgatgctgctgtagaccccattgatttcccactcgcacctgcatatgctgtacctaaggttcttaaatatgcaggactgaaaaaagaagacattgccatgtgggaagtaaatgaagcattcagtgtggttgtactagccaacattaaaatgctggagattgaccctcaaaaagtaaatgtccatggaggagctgtttctctgggccatccaatcgggatgtctggagctcggattgttgttcacttggctcatgccttgaagcaaggagaattcggtctggctagtatttgcaatggaggaggaggggcttccgccgtgctgattgagaagctgtagacatcttgttttaggagacagttccacgtgacccgctgaagtgaactaccccttgggccagattatattcaggataagctatttcattttttattattttctactaaaaatttttaaaaatcacatccaaaaacccattgaaattgcaaataaaaatttctcctcctttaatattttgtaaacagtcggatactctactattgaaatatactgtaggtactagaggcatggctcagccgttaagagcacttgttgctacctgtgtggtgcatggctttaatcccagcacttggagacagaggcaagtgcatctttctgagttaaagttagcctggtccacagagctagtgccctgacagccaagactacacagagtagtagaaactctgggggaaaaaaaaaaaacaaataaaaaaaaaa

SEQ ID NO: 273 - DNA, 1346 bp, Homo sapiens
gaattccgggagacaaccttgtcaagcacctaattgtgccatccgtgcgatgccagccagctccatccaccttacaggagtgaagtcagcgttcatatacgctgtgtggtctggcagctgagatagtgtttcccaaagggactgtggaatgttacctcagcaggcattcatttcgcgtttggaaaatcgtctccaaatgaactttctttccgtgctgggtctgcagaacatttcagaagcggagctagcaatctgcttcaactttttttcccccggtgcttgcagcaggagatgcctgaagggagctgctgcgtggtggtctgaaacatagttcaaggaatagaggtcaactgcctagagcggtgcaggcagggcacaggctggctttgtactctgagtctcaaggtatttcccagtgcctgagccagggggaaggtggggggaggaagggaaggagctgccacttggatcgctattctgggtagccaagacagatagccatacaatggaaattagtggcttcaacttgggggaaaggatggactctaacttcgagctgtgcagttcgcccattgtttgaatggacaaaaggcagtttacccaggctcctagcatacctgcctgggtgtccaaatgtaactagatgctttcacaaaccccacccacaaaacaacacatgttcttaagtcctgggctttgttttcacttcggcctcataatacccactctgacctgctgtgtaaacgacccgggacgtaccaaaatgagcgcacctccaataaagatacacatcatgtcgtcttcacatctcttctacctggcactctgcttgctcacctttaccagctcggccacagccggaccagagaccctttgcggggctgagctggtggacgctcttcagttcgtgtgtggaccaaggggcttttacttcaacaagcccacaggctatggctccagcattcggagggcaccacagacgggcattgtggatgagtgttgcttccggagctgtgatctgaggaggctggagatgtactgtgtccgctgcaagcctacaaagtcagctcgttccatccgggcccagcgccacactgacatgcccaagactcagaaggaagtacacttgaagaacacaagtagaggaagtgcaggaaacaagacctacagaatgtaggaggagcctcccgaggaacagaaaatgccacgtcaccgcaagatcctttgctgcttgagcaacctgcaaaacatcggaacacctgccaaatatcaataatgagttcaataccatttcagagatgggcatttccctcaatgaaatacacaagtaaacattcccggaattc

SEQ ID NO: 274 - DNA, 1882 bp, Homo sapiens
ctaacagcatataaatcagagggccatcacaggagtcacaatggcacactggggaagggacactctatcccatgaagaccacggcaaggggagacaactgcacagtctcacattggcttccagcaacactgacttcgcattgagcctctacaagaagctggctttgaggaatccagataaaaatgttgtcttctcccctcttagcatctcagctgccttgaccattttgtctctgggagcaaaagacagcaccatggaagagattctagaaggtctcaagttcaatctcacagagatcactgaggaagaaatccaccagggctttgggcacctcctacagaggctcagccagccagaggaccaggtagagatcaatacaggtagtgccctgtttattgacaaagagcagccgatactgtcagaattccaggagaagacaagggctctgtaccaggctgaggccttcatagctgacttcaagcagcccaatgaggccaaaaagctcatcaatgactatgtgagcaatcagacccaggggaagatcgcagaactgttctcagacctggaggagaggacatccatggtgctggtgaactatctcctatttaaaggcaagatgcagcaggtggaatccagcttgcaaccagagaccctgaagaagtggaaggactctttgatccctaggattataaatgatctccgcatgcccaagttctccatctccacagactacagtctaaaagaggtccttccagagctgggcattaagaaagtcttctcccagcaagctgatctgagtaggatcacagggaccaaggatctgtatgtctctcaagtggtccacaaggctgtgctggatgtggatgagacaggcacagaagcaactgctgctacaggggtcgctacagtcatacgtagacaacctcgaactctgaatttcaaccggccattcatggtggttatcactgacatggatagtcagtctatcctctttgttgccaaaatcactaaccccaagaggcctgtgaaagtgcccatgatgaagcttgaggacctgaccacaccctatgtccaggatgaggagctgaactgcactgttgtggagctgaagtacacaggaaatgccagcgccctgtttatcctccctgaccagggcaagatgcagcaggtggaagccagcttgcaaccagagaccctgaggagatggaaggactctctcaggcccagcatgatagatgagctctacccgcccaagttctccatctctgccgactacagcgtggaggagtgtagggcgccctccaatggtgaacaacgagtgctgtacagtaaaggcttgttcccagaagaatcctgttgccgcatgtcgttcttgctggcgagacgttgggcgcgagacgttgggtgcgagacagaggaggtccttccagagctgggcatcaaagaagtcttctccacacaggctgacctgtctgggatcacaggggacaaggacctgacggtctctcaggaggctggagcaggagggatgctgaatcctccactggctgccagcattctggctgttccctctgaagacgttgagaagctgcctgtgaggaaactcctgccgctgcctactgccatccttcagtttgtagtggtgcacaaggctgtgctggatgtggctgagacaggcacagaagcagccgctgccacaggagtcaaacttgttccaatgtctgcaaaactggaccctctgattatagttttcaaccggccttttctgataattatgtctgacacagaaactgaaatagctcccttttggccaagatatttaaccccaaatgagattcgaacttcccaagggttgacgcttctccccaggcattgaaataaa

SEQ ID NO: 275 - DNA, 2540 bp, Homo sapiens
ccgcggcccactacagcagtcgcccgccgtcagcctcccgcgctcgtctctcgtcactgctgctcggcgtccattgctgcctctccccgcagtcgccgacgtcgcttccccgcgcgctcccacaaccgccgccccgccggtcagtgaagccggtgagccattccccgcgccggcccccagaggcgggcatccagccggaccccgagtgtggccctctcctgctgtggccgtccgcgccttctcgaccgcttatccagcatgaaaaccaagttctgcaccgggggcgaggccgagccgtccccgcttgggctgctgctgagctgcggtggcagcgctgccccgacgcccggcgtagggcagcagcgcgatgccgcaggcgagctggagtccaagcagcttggtggccggtcccaacctctcgcgctgccgccgccaccaccgccgcccctgccgctgcccccgccgccatcaccgccgctagcggacgaacaacccgagccccggacgcggcgcagggcctacctgtggtgcaaggaattcctgcccggagcctggaggggccttcgcgaggaccagttccacatcagtgtcatcaggggtggtctcagtaacatgctgttccagtgttccttgccagactccatagccagtgttggtgatgaacctcggaaagtgctcttgcgactgtatggggcaatcttaaagatgggggctgaagcaatggttctggagagtgttatgtttgccattcttgcagagaggtcacttgggccaaaactctatggcatctttccgcaaggccgactggagcagtttatcccgagccggcgattggacactgaagaattatgtttaccagatatttctgcagaaatagctgaaaaaatggccacatttcatggtatgaaaatgccattcaataaggaaccaaaatggctttttggaacaatggaaaaatacctgaatcaagtactaagacttaaattcagcagggaggccagagttcaacaactgcacaagttcctctcttacaatctgcctctcgagcttgagaacctgaggtcattgctgcagtatactagatccccagttgtgttttgtcataatgactgtcaagaaggtaatatcttattgttggaaggccaagagaattctgaaaagcagaagttgatgctcattgactttgaatacagcagttacaattacaggggatttgacattggaaatcatttctgtgaatggatgtatgattatacctatgaaaagtatcctttcttcagagcaaacattcagaagtatcctacccgaaaacaacagctccattttatttcaagttacttgactacattccaaaatgattttgaaagcctcagcagtgaagagcagtctgctacaaaagaagacatgttgcttgaagtcaacagatttgcccttgcctctcatttcctctggggactttggtccattgtacaggccaagatctcatccattgaatttgggtacatggaatatgcccaagccaggttcgatgcctactttgaccagaagaggaagcttggtgtgtgaatggatggctccactcttcaccactggactgcaggaggtggctgcaccaggccctcagtggagcgctgctgtgaccactgccctgggcagaaggcctggacgtctcactactgagcaccgatgtgtatgatactacagactatattaaagtggagtaacatttctttcatctttgtttacactctcactaggactctgaaccatgattggaagcagaaatatagtgtgatagtgcaatagctcagaccccgcctaagcgggaggcctttcagctacatggctacagcttcagccacttaggccccagccagacagagcagtgctgtgtgggtactgagtgctgacttaggatattaatgtgctgcaacacgttcatgaccaggctttgaaggtgacagtctgacaatgtgttggagacactctgaagggcaagtgaacagacatactgtgaaatggctcgacaggaggagcctgaattgtggggtctgtggaggcagccagctgtttctgtacagggtacacttgactatgggtatgcatctgcaggcagtagctgcagccctcctgtgcctgtgtacacatgactacaggggccagtgtcactgactggccataactgcagtgtctcctaactgggtgtgctttatgcttcagcttcccggggaggagcagtggagccagcttcctcaccccttcttgccttctctctgcctgacctggaacttgggctttcgcccattgccctctgaagctgcttcccatctgatgtcactgggagacagcagctgtatgtgtggggtattggggtgcaggtagattagagctgtgaaatccatgtacattaatacccaatgggataaacctagaatttttttttttttactctgaactctgaattgttttgtgcacatatttctgctaccaccgaaactgtattatacagataaataaacaacttgaaacttaaaaaaaaa

SEQ ID NO: 276 - DNA, 1137 bp, Homo sapiens
gggggtgtgtgtgtgtgtgtgcgctacggggtgtagactgtgtctgaaatagcgggaacgccatgtcccgtggttccagcgccggttttgaccggcacattactattttctctcccgagggccgactctaccaagtagaatatgcttttaaggctattaaccagggtggacttacatctgtagctgtcagaggaaaggactgcgcagttattgtcacacagaagaaagtacctgacaaactactggattccagcaccgtgactcacttattcaagataacggaaaacattggctgtgtgatgacaggaatgacagctgacagcagatcccaggtacagagggcacgctatgaagcagctaactggaaatacaaatatggctatgagattcctgtggacatgctgtgtaaaagaattgctgatatttctcaagtctacacacagaatgctgaaatgaggccacttggttgttgtatgattttaattggtatagatgaagagcaaggccctcaagtgtacaagtgtgatcctgcaggctactactgtggctttaaagccaccgcagcaggagtgaagcagacagagtcaaccagcttcctcgaaaaaaaagtgaagaagaaatttgattggacatttgaacagacagtggaaactgcaatcacatgcctgtctactgttctgtcgattgatttcaaaccttcagaaatcgaagttggagtagttacagttgaaaatcctaaattcaggattcttacagaagcagagattgacgctcaccttgtggctctagcagagagagactgaacactcttatcagcttaccagatccatgatgccatgtgcctatgtgtttagtaacaacaaaccgacatcttagaggccctggattgaagatggaaactctcccactcctcctgccactgactggttaggactctgtataaataaaacagtgcttttggaaaaaaaaaaaaaaaaaaaaaaaaaaaaaaaaaaaaaaaaaaaaaaaaaaaaaaaaaaaaaaaaaaaaaaaaaaaaaaaaaaaaaaaaaaaaaaaaaaaaaaaaaaaaaaaaaaaaaaaaaaaaaaaaaaaaaaaaaaaaaaaaaaaaaaaaaaaaaaaaaaaaaaaaaaaaaaaa

SEQ ID NO: 277 - DNA, 880 bp, Homo sapiens
gatctccgcactgctaggatgctgcaagccggagcacctaccgccggctctttccggacgggagaagtccacaccgggacaaccatcatggctgtggaatttgacgggggtgtcgtggtgggctctgattcccgagtgtcagcgggagcagccgtagtgaaccgcgtgtttgacaagctctcccctctgcaccagcgcatctactgtgccctctcgggttccgctgctgatgcccaagccatagccgacatggccgcctaccagctggagctgcacgggttggaactggaggagccgccccttgttctggctgctgcaaacatagtgaagaacatctcctacaagtaccgcgaggacttgttagcgcatctcatggtagctggttgggaccaacatgaggggggccaggtgtatggaaccatgggagggatgctaattcgacagccctttgcgatcggcggttccggaagcacctatatttacggttatgtggacgcagcttataaaccaggcatgacccccgaggagtgccggcgtttcaccacagacgccatcactctggccatgaaccgagatggctccagtgggggtgtcatctacctggtcaccattacagctgatggtgtggaccatcgcgtcatcctgggagacgagctgccaaaattctacgatgagtgaagtcccttctttgtttgcaataaactttatggagccagaggttggtgtaatgggcagaggtgaaatgggtatcagagaaacggagtgcgtggagggaagcttcctcccggccgagagatcagcaagcacctcccattcttttttaaaaaataaactttattattaaaataaaaaactcttataaataaaaaataagtaaaac

SEQ ID NO: 278 - DNA, 880 bp, Homo sapiens; identical to SEQ ID NO: 277

SEQ ID NO: 279 - DNA, 1564 bp, Homo sapiens
cagctgataggcttgcaaagaccctaaccctatcatcgacggccgcacagacgtgaacctggcctacctgggtgccaagcctaggagcctgcagacgggctattgcaaccatactccccccggaacccaaagacttgcgggattggagagcgaccgcagagagccctcagagctctacccgccgccggcctagtcaccatcacaccccgggaggaggccgcacgtgccgcagccggccccagtcaccatcaccgcaaccatgagcagcgagcccgagacccagcagccgcccgccgcccccgccgccgccctcagcgccgccgacaccaagcccggctccacgggcagcggcgcgggtagtggcggcccgggcggcctcacatcggcggcgcccgccggcggggacaagaaggtcatcgcaacgaaggttttgggaacagtaaaatggttcaatgtaaggaacggatacggtttcatcaacaggaatgacaccaaggaagacgtatttgtacaccagacggccataaagaagaataaccccaggaagtaccttcgcagtgtaggagatggagagactgtggagtttgatgttgttgaaggagaaaagggtgcggaggcagctaatgttacaggccctggtggagttccagttcaaggcagtaaatacgcagcagaccgtaaccattatagacgctatccacgtcgtaggggtcctccacgcaattaccagcaaaattaccagaatagtgagagtggggaaaagaatgaaggatcggaaagcgctcctgaaggccaggcccaacaacgccggccctatcgcaggcgaaggttcccaccttactacatgcggagaccctatgcgcgacgaccacagtattccaacccccctgtgcaaggagaagtgatggagggtgctgacaaccagggtgcaggagagcaaggtagaccagtgagacagaatatgtatcggggttacagaccacgattccgcaggggccctcctcgccaaagacagcctagagaggatggcaatgaagaggacaaagaaaatcaaggagatgagacccaaggtcagcagccacctcaacgtcggtatcgccgcaacttcaattaccgacgcagacgcccagagaaccctaaaccacaagatggcaaagagacaaaagcagccgatccaccagctgagaattcgtccgctcccgaggctgagcagggcggggctgagtaaatgccggcttaccatctctaccatcatccggtttggtcatccaacaagaagaaatgaatatgaaattccagcaataagaaatgaacaaaagattggagctgaagaccttaagtgcttgctttttgcccgttgaccagatccactagaactgtctgcattatctatgcagcatggggtttttattatttttacctaaagatgtctctttttggtaatgacaaacgtgttttaagaaaaaaaaaaaaaaggcctggtttttctcaatacacctttaacggtttttaaattgtttcatatctggtcaagttgagatttttaagaacttcatttttaatt

SEQ ID NO: 280 - DNA, 2842 bp, Homo sapiens
tcgcggaaggtgacgtggacacggaagtggtcgtcgtcgcggcggcaccggtgggagcggggccctgcacttggagtgcggcgggcaagcggacgggtggcggaggcctctcagcggcggcggcggcgacttaaggcgcaggcgtggtccgttgggtgcgaatccgctgagcccacgagcggcctcttagccctctctcctgcccgtcggaaaccgggagcagggacccgcttagccggcgtcatcatgaccaagaccggtagcaagggcgggaacctccgcgacaagctggacggcaatgagctggacctgagtctcagcgacctgaatgaggtccccgtcaaggagctggctgcacttccaaaggccaccgtgttggatctgtcctgcaataaactgagcactcttccgtcggatttctgtggcctcacgcacctggtaaagctggacctcagcaagaacaagctgcagcagctgcccgcagactttggtcgcctggttaaccttcagcatttggatctcctcaacaacaggctggtcaccctgcctgtcagctttgctcagctcaagaatctgaagtggctggatctgaaggacaatcccttggatcctgtcctggccaaggtggcaggtgattgcttggatgagaagcaatgtaagcagtgtgcaaacaaggtgttacagcacatgaaggccgtgcaggcagatcaggaacgagagcggcagcgccggctggaagtggagcgagaggcagagaagaagcgtgaggccaagcagcaagctaaggaagcaaaggagcgcgagctgaggaagcgggagaaggcggaggagaaggagcgtcggcgaaaggagtatgatgctcagaaagcttccaagcgggagcaagagaagaagcctaagaaggaaacaaatcaggccccaaaatcgaagtctggctctcgccctcgcaagccaccaccccgaaaacacaatcgctcctgggctgtgctgaaggggttgttgctgctgctgctgctatgtgtagcaggagggctggttgtatgccgggtgacagggctgcaacagcagcccctctgcaccagcgtgaacgccatctacgacaatgccgtccagggcctgcgccatcatgagatcctccagtgggtcctccagaccgactcccagcagtgagctcatcctcagcaccgctgcctcccagcctcggagcttggattcctatggaattgggttctgctggacacaacttctttttagcgtcagacctacctgccatcatcaaatggctgctgagtggtacttgagatctcccctttgtaggacttctctgttccttagtcagggttccctggtggaatgaggagaaatggagaggggggaggaagagttacctgcatgcctaaaggaataggcttaggggtggggagagagaaggcataggcttttctagttatgcaaagctgtgtaaggcaaggttcctttctactaaatggtcagctgtcactacatttatacttttgtatgtcacaaaccctttctttcattcctccctgggtaaccaggacggattggagggcagtgtgttactgggactaggggactaggaatacttgggtaaattcagcctaagctgggagggtaaagtaatacatttccttaaagatctcagacagtcaagcattttagcaatgtccaaaatgtctggctatgaacacatgttcactgccattggtccagtgtaacactttgaggcaggaggtgccgtccatgacttacttgcctacagtgttcaagctagtccaaggcacaacccagctttcactccagttttcttcctttcctttatgtcatttggcctcctttataatactcaaggggatgaactcacaccagagttgtcttagctaaagtgaatctttcataatagacggtcttaccacccacaaatagatctcatcagggtcctgggaaactaatcctgtggaattttgcctcagcttaaatggcttccacaaaatggcagcaggctgggctccttgcctcccttttagagcattaaactccctgatggcctggaagcacaggggcagatctctgcagcggcactgtgactgccctactagcacttggtatgatgaaatacctcaaaggcaacctagaaacttgatctcacagaagcaggtgcagagttgcttctggacctgtaacagaagggaaggaatagaacagtgggagccaaagggaaacaaagtcacacggtggcgctgcaagtgatacataagtaaacattagcacaaaccagggcagcagcacccacctccctgctgctaccagaaagcattctccccgcttccctgtctcttcacaacagctgcaggaagggatcggaaacctgtctcggtgcttatttgctaaaactcccaactgcaagctctccctagaggagcaggacctgtcggagttcagacagtgtagccccagtggcccatgtgcttaggtcagccactcaagactgtcctgacacgggaagaaaggcctttgtttttccctcccccagatagttctgccgtgtaggtccacaccttactcagaatcactacacattcctttagtcttcctccaagctccagagccatcggtacaaatgctttattgagacaaaatacatactacatatggtgacatcatgaaaacagaagtcagcctcatagatccctggctggttgaggcagctcagtggctgggcgtagtcaagccaacccgcaggcaagagttcactctgacttcgagatttgatgcttattctttggatttctacaattattaaatccgtgtctgagtggtc

SEQ ID NO: 281 - DNA, 2842 bp, Homo sapiens; identical to SEQ ID NO: 280

SEQ ID NO: 282 - DNA, 2026 bp, Homo sapiens
aggaagccctgcagagcatcagaggcccagctagagggacaacacagaggagtaatttgctgacagacctgcagggatggacctgctttcagctctcacactggaaacctgggtcctcctggcagtcgtcctggtgctcctctacggatttgggacccgcacacatggacttttcaagaaacaggggattcctgggcccaaacctctgcctttttttggcactgtgctgaattactatatgggtttatggaaattcgatgtggagtgccataaaaagtatggaaaaatatgggggttgtttgatggtcaaatgcctctgtttgccatcacggacacagaaatgatcaagaatgtgctagtgaaggaatgcttttctgtcttcacaaaccggcggtattttggcccagtggggattatgggaaaggccatctctgtatctaaggatgaggagtggaagagatatagagccttgctgtcacccacgttcaccagtggaagactcaaggagatgttccctgtcatcgaacagtatggagacattttggtaaaatacttgaggcaagagaaaggcaaacctgtccctgtgaaagaagtgtttggtgcctacagcatggatgtgatcaccagcacatcatttggagtgaatgttgattccctcaacaacccgaaggatccttttgtggagaaagccaagaagctcttaagaattgatttttttgatccgttgttcttgtcagtagtactctttccattcctcacgccagtatatgagatgttaaacatctgcatgttcccaaaagattcaatagaatttttcaaaaaatttgtgtacagaatgaaggaaacccgcctggattctgtgcagaagcatcgagtggattttcttcagctgatgatgaatgctcataatgattctaaagacaaagaatctcatacagccctatccgatatggagatcacagcccagtcaatcatttttatttttgctggatatgaacccaccagcagcacactttcctttgtcctgcattccctggccactcacccagatacacagaagaaactgcaggaggagatcgacagggctctgcccaataaggcacctcccacctatgatactgtgatggaaatggaatacctggatatggtgttgaatgaaaccctcagattgtatccaattggtaatagacttgagagagtctgtaaaaaagatgttgaaatcaatggtgtgtttatgcccaaagggtcagtggtcatgattccatcttatgctcttcaccgtgatccacagcactggccagagcctgaggaatttcgcccagaaaggttcagcaaggagaacaagggcagcattgatccttatgtatatctgccctttggaaatggacccaggaactgcattggcatgaggtttgctctcatgaatatgaaactcgctctcactaaagttctgcaaaacttctccttccagccttgtaaggaaacacagatacctctgaaattaagcagacaaggacttcttcaaccaacaaaacccattattctaaaggttgtgccacgggatgaaatcataactggatcatgattttccctcaaggagttctgctgaattcttcagaaatgtggtgtctaagaacaccagaccctttaatttatgtcatgaataaaattcagatgaaattagggcttaatcgactttgttttgatttggtacatctttgctctttctcagtgtctacaatgtacccatctaatataaaggaaatgacaagtcagtgacagaacaggaacttaacctttggtgattctcatgggactacctccatccacatctggttgtctctgttaatttcttttgatagtaaccttgtctctgtaatttgatcaagaatttttcatgaaaatgtgaactattgtgacaactttaattgtagatttggtatcagatgttttagatgcattattctacactaaatgttacatggaaaaaatgtgaataaacacttctttaaaaaatccccatttt

SEQ ID NO: 283 - DNA, 1715 bp, Homo sapiens; identical to SEQ ID NO: 272

SEQ ID NO: 284 - DNA, 1139 bp, Homo sapiens
agatttgaaccgccaccatgtcgagcaaaaaagcaaagaccaagaccaccaaaaagcgccctcagcgcgcaacgtccaacgtgttcgccatgtttgaccagtcccagatccaggagttcaaagaggccttcaacatgatcgaccagaaccgggacggcttcattgacaaggaggacctacacgacatgctcgcgtctctggggaagaaccccaccgacgcctacctggacgccatgatgaacgaggccccgggccgcatcaatttcaccatgttcctcaccatgtttggagagaagctgaacggcaccgacccagaggacgtcatcagaaacgccttcgcttgcttcgatgaggaagccacaggcaccatccaggaggattacctgagggagctgctgaccaccatgggtgaccgcttcacagatgaggaagtggatgagctgtacagggaggcccccatcgacaaaaagggcaatttcaactacatcgagttcacgcgcatcctcaagcacggagcgaaagacaaagatgactgaagaggctgcagctgacattcctgttgagtttccttattcacttcatgtctcagacacagcccccataggacctactgtgtgccactttgtgtccctcagacaccccctcccataggcctactgtgtgccgcttagtccctcagacaccccctcccataggcctactgtgtgccacttagtccctcagacaccccctcccataggcctactgtgtgccatttgtccctcagacaccccctcccataggacctactgtgtaccacttggtttctcagacagccccacccccaaacccccctaaggacctactgcgggccacttagtttcacagcctttcctttttttaatgtatttattccagaccctttctgccacttagcatgtgtataatcagactggaatggggacaatgttgtaattgtactgaaaatgagatgcaaataaaaaaatcaaccaatgtgaaagcccaggaaaatatatcggcatttctggttttgctggatttttttacatttttatataataaaaatgttattttgaaataaagattatgctgactcaaggtggagtataaaacaaaaaaaaaaaaaaaaaaaaaaaaaa

SEQ ID NO: 285 - DNA, 981 bp, Homo sapiens; identical to SEQ ID NO: 26

SEQ ID NO: 286 - DNA, 981 bp, Homo sapiens; identical to SEQ ID NO: 26

SEQ ID NO: 287 - DNA, 2115 bp, Homo sapiens
cgggcatggcagagatgcggccggggccagtggttggaaaacagctcaacgagcagcccgaccactcgcccctggtccagccgggcctggccgaactgaggcgccgggcgcaggaggagggcgtcccagagaccccgcagccgctcacagacgctttcttgttgcgattcctgcgtgcccgggatttcgacctggacctggcctggcgcttaatgaaaaactattacaaatggcgagcagaatgtccagaactaagtgcagatctacaccctagaagtatccttggacttctgaaggctggctaccatggagttctgaggtccagggatccgactggcagtagagttctcatttaccgaatttcctattgggacccaaaagtttttacagcctatgatgtatttcgtgtaagtctgatcacatcagagctcattgtacaggaggtggaaactcaacggaatggagtcaaggctatatttgacctggaaggctggcagatttctcatgcttttcaaattaccccatctgtagccaagaagattgctgctgtagttacagattcctttccattgaaagttcgtgggatccatttgataaatgagccggtcattttccatgctgtcttttccatgattaaaccatttctgactgaaaagattaagggtcggattcatctgcatgggaacaattataaatcaagcctacttcagcacttcccagacattcttcctctggaatatggtggtaacgagtcctccatggaggatatttgtcaggagtggacaaattttataatgaagtctgaagattatctcagcagcatttctgagaccatccaatgagaagttgtttcctgtgaatgacttcatctaaaattcaaggatgggattctatctggttactaaactcaagaccaaaccttctaaacgaattgatccttatctgatctttaaacacgcaacatggatatttggaggatgttttaatttcaacaatgctctgttccttttaaattaattaaatgttaggaaagaaggatatttctggttttcccttgaagagcaaacatagcttcatctaaagtagttgttccagtgtttctttgcatggttcaggaaattttatattaaacaaaactttatgatcccattgtttaatattagattgatggttatctactggaaagaaatactgtacgcatcaactgatggtgaaacaatattaatgctcagctgagattggtagataaccataaatcaggttgcagtctgaatacagattaattagttcatctcaggtaaatccgactttagcatatgcacaatagaagccttcaatgtcagtctacacactataatattgcaatcaatgaaatcactatggttgataaaggtgattcagaacttaagaaaaatttctgggcacagtagatggtttctcatactgtcttgtattttcaaataagtaaagaatataattatggcttctggttatagacagggaagtagatgtatatgttttttacatagacttgaaaatttaagagaactacataaatgaaaggaggtgtttacattttaaaccatcagcagtgatacctagtatttttcagattattcataaataatttgattttattctgatataattgactattacctcagaatattctgtttagtttaaacagtcggcagctgggatgtgcagtctctaccatagtgcagttcatttctaagactttcattcattgagaaaggtgtgatctgatcctgtattcagcccagccttcaatttggcacataggtttatacttgatgtttctaattaattttattttaaactggaactaatacaaggcaaagaacttaatgaatttatgttcaaatagttagacttctacattaatttcataagagtatctttgtacgaggatatttttcattgtacaagggtgtttttctttataagaaaataagtctaatcagataagctgatactcatgattctctgtacatatacttctgacaaaactgaaaggtgcagatagatgttctttagagaactgtttaattttgatttagcaactagacgttaactttactatttaattttact

SEQ ID NO: 288 - DNA, 1928 bp, Homo sapiens
cagtccagactctaagatttcagaatgactaccatcttgacttccacttttagaaacctttctactacatcaaaatgggccctcagattttctgtaagacctctgagctgttcttcacaagtacagtctgccccagctgtccagaccaagtcaaagaagactttagcaaaacctaatctaaagaacattgtggtggtggaaggtgtccgaattccatttctgctgtcaggcacttcgtataaagacctaatgccacatgatttggctagagccgcactttcgggtttgttgtatcggaccaatattccaaaggatgttgttgattatatcatttttggtacagttattcaggaagtaaaaacaagcaatgtggctagagaggctgccctgggagctggcttctctgataagactccagctcacactgtcaccatggcttgtatctcttcaaaccaagccatgaccacagctgttggtctgatagcttctggccagtgtgatgtcgtcgtggctggtggtgttgagttaatgtctgacgtccctattcgtcattcaagaaatatgaggaaaatgatgcttgatctcaataaagccaagactctggcccagcgcctgtccttactcactaaattcagattgaattttctgtcccctgagctccctgcagtggctgagttctccactaacgagacaatgggccactctgccgaccgtctggctgctgcctttgctgtttctcgaatggaacaggataaatatgcactgcgttctcacagtctggccaagaaggcacaggatgaaggacatctttctgatattgtacccttcaaagtaccaggaaaagacacagttagcaaagataacgggatccgtccttcctcactggagcaaatggccaaactaaagcctgcattcatcaaaccctatggcacagtgacagcagcgaattcttctttcctgactgatggcgcttctgcgatgctaatcatgtcagaggacagagctctggccatgggttataagccaaaggcatatttgagggattttatatatgtgtctcaggatccaaaagatcagcttttacttggaccaacatatgctactccaaaagttctagaaaaggcaggattaaccatgaatgatattgacgcttttgaatttcatgaagccttctcaggtcagattttggctaactttaaagctatggattctgattggtttgcacaaaactacatgggtaggaaaaccaaggttggagcacctcctctggagaagtttaatatctggggcggatcactctctctgggacacccttttggagccactggctgtcggttggtcatggcagctgccaacagactgaggaaggatggaggccagtatgctttagtggctgcctgtgcagctggaggacagggtcatgctatgattgtggaagcctacccaaaatgactgctctggaaggaggcaactgatctctgcagcactcgcactgggcaatgccatttcaatgcactaccaagtgatacctgcagttcctagctcttcttaggaaacaacatttgtggccttctcttaaatattttgcggtcaagccttgccagtgttcgagctttccgataatcacagcttctgctctctaagttccagactatcacagatgtgtacacagttcttgttatctcttgtctctaagactaatgactgccagctgcttggagagaggttagctgaggtttagaaccatctttgtaacatttgcagaatctcctccttcctgtcagtgtcctacagagaattattttttctaaaatacaatccaatgtgcctacattaagttactatagaaaaaaataatctaaacatctcctaaaactgacttgcttagagacatgtttgttgaccttaataaagtagacatgtattag

SEQ ID NO: 289 - DNA, 2466 bp, Homo sapiens
tttaaatagtaagaaaaaattcacagacagaaaaatttttgttaccaggtggccataaagaggtttcttgcccacagtgaactgatagctgtgacccacgtgtggttcctatggcgtcttggaagtacctccaaccctgtgaaagtgcattcctcacacagggctgtctcagaacagtcagaagaccctcgccagacccaagacctgcttggttgcatgagtaacaagcgatggattccatatctctgcgtgtagcactaaatgatggtaacttcattcctgtactggggtttggaaccactgtgcctgagaaggttgctaaggatgaagttatcaaggctactaaaatagctatagataatggattccgccattttgactctgcttatttgtacgaagtagaagaggaagtgggccaagccattagaagcaagattgaagacggcactgtgaagagagaagatatattctatacttcaaagctttggagcactttccatagaccagagctggtccgaacttgcttggaaaagacactgaaaagcactcaactggactatgtggatctttatattattcatttcccaatggctttgcagcctggagatatatttttcccacgagatgagcatggaaaactattgtttgaaacagtggatatctgtgacacatgggaggccatggagaagtgtaaggatgcaggattggccaagtctattggggtgtccaactttaactgcaggcagctggagaggattctgaataagccagggctcaaatacaagcctgtgtgcaaccaggtggaatgtcacctttatctcaaccagagcaaaatgctggactattgtaagtcaaaagacatcattctggtttcctactgcacgctgggaagttcacgagacaaaacatgggtggatcagaaaagtccagttctcctagatgatccagttctttgtgccatagcaaagaagtacaagcaaaccccagccctagttgcccttcgctaccagctgcagcgtggggttgtgcccctgatcaggagtttcaacgcgaagcggatcaaagagctaacacaggtttttgaattccagttggcttcagaggacatgaaagccctggatggcttgaacagaaatttcagatacaacaatgcaaaatattttgatgaccatcccaatcatccatttactgatgaatagtaacatggtggactttgtcagcatttctatcggaagatctgtttatgcattgtgatttgaaagatatcttggatactggtgactgaatgcatcagaccactgtttctgttaattcacagtcagctggagcaatgtccacagtgctatgagggaagccatgtttttgtcacactctgaaatggaacatcacgttgcttttccttgtgtttttaaatattcatttattttgctttccatatatgaatattttccctacatgtatgtgtatctcatgaatgtctatgtccatgcagggttgaagagtgttgcaggtcacttggaaccggagttacattgattatggagttaccatgtgggtgctgggagccaaacctaggtcttctgtgagactagcaagtgcctttgaatgctgagccatctcattaggtccaaccctaaagatccttgcctgccactatttctgtgatctcaatgttttgttttctcctgacttctgacaccaagctgatttgctagaagtcttgggcatgaagtgggtgttgaggacagttattgcaaagggatttctgggtgggagttgaaagaacgttcaacattcagggaattaattgttcgaggttattgattagtcaatattccccatattctttgaggaagaagaaagtactccatagattttccctttttcttagttttgaggtagggcacctgtggcaggagtgaccaagagacccagggttctctccaacagcccaagaaccagagctccaagaacctggagagcaagttcttgtgggaaggttggaatgttggtaagaagagaaccaatctaaaagcatcatcatgattcagatgtggggagtttgagaggaaatttgaatgtgtctctctttttgggaaatatatcatcttttttctttttgtaattacatgttgggagcaatgcccttgaaaccctccattattgatgtaatggttagaattaagtatgactgggttcatggaaaatccccagccagctgcagaagactaatacaaatctggtggtcaggatgaataatgatatgataaagttctgaccttgctgagaaatacatctgacatcaagatacccaatgtgatgacctgtaagctttctgaaaaaccaacatcctgttgacatcagctgactacatgtatactgtgcccttggcctgtgtaaatgtttcacacttcccccctccctctgttacccatgttatggtataaattcagccttggtaaaaaa

SEQ ID NO: 290 - DNA, 5634 bp, Homo sapiens
  misc_feature (1388)..(1487): n is a, c, g, or t
  misc_feature (2134)..(2233): n is a, c, g, or t
  misc_feature (2556)..(2655): n is a, c, g, or t
  misc_feature (3092)..(3191): n is a, c, g, or t
  misc_feature (3432)..(3531): n is a, c, g, or t
  misc_feature (4131)..(4230): n is a, c, g, or t
catggacaagcaccaatccctgacactattaatgacactctattatcagacaggagtctagcataactgtcctctgagaggctccacccagcaactgtctgaaacataacagatatcaaagccaaatattagacagaactcagggactcttatagaagagtttggggaaggaccaaagaacatggaggggcatggaacaccacaggaagaccaacagagtcaactaacttggaacttgtgggatctcagaatatgaaacaccaaccacacatgggctggacctgattctcacacacacacacacacacacacacacacacacacacacacacacacacacctgctcagagatgtgcaggtctatcttctgtcggctgttcaacaactggaattggagctatcctaagactgttgctgttgatctgttcccctacctaggctaacttgtctggcctcagcaggagaggatgtgcctatccctgcagagacttgatgttccagggtaggcagatagatacccagtgggagcctccgccctctgagaggagaaggagagggaaggatgggtagagggactatgcagtggttgtaggggggatcttgaggaggaggcattaattgggatataaaatgattaaataaataaataaatgaaaaatgtaatgttccttcatatatgcagcacacacagctccatgcctaagtaaatgagcagatgaaactaaactgacaagtgcagaaatcgaaatgtgttacttccaatgccttctctcctgtgtatctatttcatgatgtctttgccaacatctaaggttgggataaaggaatggggagtgaacaggtcaccaggagcccaaacaggaagtatgggtgctcacatacctggacagtgatgagaccgggaggtgggaacagctggagttgcttaagtgagtagggaggcgggctcatgataaaagatcctgctggagtgttccctgatgtcaacagtggttagaccaggaacatggaactcggtgtcttgctcctcctcactttcactgtgggcttcttgctattattagccagccaaaatcggccaaagacccatggccacttaccaccaggacctcgtcccctgcccttcttggggaacctcttacagatgaacagaagaggccttctgcgttctttcatgcaggtgagacatgcacaggacttgagccctgtgggcttagcctgtgttgactccttggagtcactcagcaggaagagcaagggactccttcagactttaggttcaattgtgaaagtcactgagtgaaaggtagcatgcagtcttgcgatgatggtgctcagatagacaggcaagtcttcctgtgttggaactgtttggagcactgtgcttnnnnnnnnnnnnnnnnnnnnnnnnnnnnnnnnnnnnnnnnnnnnnnnnnnnnnnnnnnnnnnnnnnnnnnnnnnnnnnnnnnnnnnnnnnnnnnnnnnnnagacctgcttcactgtttggtcatcagaaggggaagggtagcctatttatccgtctgtatctaagtgttttaaaactttaacaatgtctgtgctgacgggccacaatcctggtgttcttgtgatttgccagcttcaagaaaaatatggagatgtgttcacagtacacctgggaccaaggcccgtggtcatattgtgtgggacagacaccataagagaggctctggtggaccaagctgaagcgttctctggtcggggaacagttgctgtgctccatccagttgtacagggatatggtaagatatgggacagtagggagaggaggatgtggcccaggtaggtgagtctgagacctgaaacccaagctgtggagaaggactccggattctctgaacttccaatgtaacccacctacccacatttgccctgctttcttaggtgtgatctttgccaatggggaacgttggaagatccttcggcgattctctctggtcaccatgagaaacttcgggatgggaaagcgcagtgtagaggagaggataaaggaagaggcccagtgtttggtggaggaactgaagaaatacaagggtgagacttggagaatgggcattaagaagatatgagggccaaccagagaaagacacaaaannnnnnnnnnnnnnnnnnnnnnnnnnnnnnnnnnnnnnnnnnnnnnnnnnnnnnnnnnnnnnnnnnnnnnnnnnnnnnnnnnnnnnnnnnnnnnnnnnnnactgagtgatggggacagcctcatgagatggaaataaattcagatattcccctggttctatatttcctgtctcctgtcttgcctcctcgttctccaggagccctcctgaaccccacctccatcttccagtccatcgcagcaaacatcatatgctccattgtctttggagagcgctttgactacaaagaccaccagttcctgcgtctgctggatctgatctatcagacattttcccttatgggctccttgtccagccaggtcagtgggtgggaagagaggagcatccagggcagagaaaacaagagattgcattgtgggtgaannnnnnnnnnnnnnnnnnnnnnnnnnnnnnnnnnnnnnnnnnnnnnnnnnnnnnnnnnnnnnnnnnnnnnnnnnnnnnnnnnnnnnnnnnnnnnnnnnnntctctctcagtgtagtgtagtgtagtgtagtgtagtgtagtgtagtgtgagggggcattgttcatgaaatctgagtacctaggagcactgcccacttcccgtgacctgacagctccaggtgagcccctgagtctctttcttacaggtgtttgagcttttctctggcttcctgaaatacttccctggtgtccacaaacaaatctccaaaaacctacaagaaatcctcaactacattgaccacagtgtggagaagcacagggccaccttggaccccaacactccacgagacttcatcaatacctaccttctgcgcatggaaaaggtgagtcctgcatggatgagagagggggtgggtgagagtgaaggatggggatgtgtcttagaaaaagaggggaaagaggatgatgagaagagatggaaaaagaggggaggagatnnnnnnnnnnnnnnnnnnnnnnnnnnnnnnnnnnnnnnnnnnnnnnnnnnnnnnnnnnnnnnnnnnnnnnnnnnnnnnnnnnnnnnnnnnnnnnnnnnnnggatccagtcatccctgacccttccttctctctcccatctggaaccaggagaagtccaaccatcacacagagttccatcaccagaaccttgtgatctctgtgctctctctcttctttactggcaccgagacgaccagcaccacactccgttacagcttcctgatcatgctcaagtacccccacgtcgcaggtgtgccatgggtgaacagttggggatcttcaacttccttttggctgcagnnnnnnnnnnnnnnnnnnnnnnnnnnnnnnnnnnnnnnnnnnnnnnnnnnnnnnnnnnnnnnnnnnnnnnnnnnnnnnnnnnnnnnnnnnnnnnnnnnnnccccagaaaacaggttggtatgcattgcctctgaaaagagcactgtctattgtctcccctttctatgcagagaaagtccaaaaggagattgatcaggtgatcggctcacaccggctaccaacccttgatgatcgtaccaaaatgccatacactgatgcagtcatccatgagattcagagatttgcagatctgatcccgattggtctaccacacagagtcaccaatgacaccatgttcctagggtacctgctccccaaggtgaggccagttgtgattcctcatcactactccatgagcatcctccactctcctaatcaccaacctcatcctgtctgtggttttccaggactgtgtttcttagggactgactgttttacatatgggagtcaggatatgttgacctcttcatgtttcataacttctcctagaacactgaggtttaccccatcctgagttcagctctccatgacccacggtactttgaccacccagacaccttcaatcctgagcacttcctggatgtcaatgggacactgaagaagagtgaagcttttctgcccttctccacaggtgagacagacctgtaattccttttctagnnnnnnnnnnnnnnnnnnnnnnnnnnnnnnnnnnnnnnnnnnnnnnnnnnnnnnnnnnnnnnnnnnnnnnnnnnnnnnnnnnnnnnnnnnnnnnnnnnnngtaccctgaggctcacatgacttgtcctttgtgcccacaggaaagcgcatttgtcttggagaaggcattgcccaaaatgaattgttcattttcttcaccgccatcctccagaacttctctttggcaagccctgtggctcctgaggacattgacctcagtcccattaacagtggtataagcaaaataccctcaccataccagattcacttcctgtcccgctgtgtgggttgagagaggagtgtcaacgtctcacttttccccaactccataccctgtgaatggaataggaaaagctaatgaagggcctttcttgatgtaaagacagagagacttctggaggccacagcttgttctgagtcacctctctcatgcttgttaacagccatagtccctacttgccagtctatattccaggatctgtgtgaatagactacagatggtttctcttgagttggctccaccctactccgtgtgttgtgttggagggtcatgtgtgaggacctcattgatagatgagtaagagaccccatgaatgtatcacagtgctagtgagtggtggggacaagatcacgctgtgagtttagaagtgtgacccctctcctgcttgtgtttacatgcagatgaaatccatataacgaagctgacaaaattttttagttttgtattcagtgccagaggctcatgtagttcacactgacctcaaaatcctatatatattcaaagatgtcttgaaatctcgatctcctgaccagtgctgccatcacaggcacatggacctacacccagattttaacatgactatatcttaatgtttatattttaatctcctttaatttattcacaatacgtacaacttcactatctaattccaggtatcttgtcccatttaaccaacaccactccaagccccaacctattcaaagatcagtccctcattcgttctctccataacctcccctgcactggacacccacagtgccacttttgtttgacctttgtgtcaatggactggcctgacctgtgtgtcttgtagaaaaggcaaggatgtgaccttgcatgctggctgccttttatgccacacccaacttctcaggcccctgtactgtgcaggccacagtcacacaccttcacagaccttccccattcgctctcttagattctttaccctgaatcttctctctagacaaggatctcctcagccctccacccctgagctgtgtgactctacttagattctcgaacatccccctgtaagtcctccatggatctcataaatacaccaaccttcctcaccaatcaaaaaaggatccctggtatgattttgtttgagcgtggtttgcttgcttgtttgtagagacaggatctcactatctacctctggctggtcttgagctcactgaattc

SEQ ID NO: 291 - DNA, 3216 bp, Homo sapiens
ggtacccaacagcctgaactcagagccccgagagcagagcattcagggcaagcagaaacaccctgcagaggctttccaagaatccctcggcatggcaagacaaggctgtctcgggtcattccaggtaatatccttgttcacttttgccatcagtgtcaatatctgcttaggattcacagcaagtcgaattaagagggcagaatgggatgaaggacctcccacagtgctgtctgactctccatggaccaacacctctggatcctgcaaaggtagatgctttgagcttcaagaggttggccctccagactgtcggtgtgacaacctgtgtaagagctacagcagctgctgccacgatttcgatgagctctgtttgaaaacagtccgaggctgggagtgcaccaaagacagaagtggggaagtacgaaacgaggaaaatgcctgtcactgcccagaagactgcttgtccaggggagactgctgtaccaactaccaagtggtctgcaaaggagaatcacactgggtagatgatgctgcgagaaatcaaagttccgaatgcctgcaggtttgtccgcctccgttaatcatcttctctgtggatggtttccgtgcatcatacatgaagaaaggcagcaaggttatgcccaacattgagaaactgcggtcctgtggcacccatgtcccctacacgaggcctgtgtaccccacaaaaaccttccctaatctatatacgctggccactggtttatatccggaatcccatggaattgtcggtaattcaatgtatgatcctgtctttgatgcttcgttccatctacgagggcgagagaagtttaatcataggtggtggggaggccaaccgctatggattacagccaccaagcaaggggtgagagctggaacattcttttggtctgtgagcatccctcatgaacggaggatcctaaccattcttcagtggctttctctgccagacaacgagaggccttcagtttatgccttctactcagagcagcctgatttttctggacacaagtacggcccttttggccctgagatgacaaatcctctgagggagattgacaagaccgtggggcagttaatggatggactgaaacaactcaggctgcatcgctgtgtgaacgttatctttgttggagaccatggaatggaagatgtgacatgtgacagaactgagttcttgagcaactatctgactaatgtggatgacattactttagtgcctggaactctgggaagaattcgagccaaatctatcaataattctaaatatgaccctaaaaccattattgctaacctcacgtgcaaaaaaccggatcagcactttaagccttacatgaaacagcaccttcccaaacggttgcactatgccaacaacagaagaattgaagacatccatttattggtcgatcgaagatggcatgttgcaaggaaacctttggacgtttataagaaaccatcaggaaaatgttttttccagggtgaccacggctttgataacaaggtcaatagcatgcagactgttttcgtaggttatggcccaacttttaagtacaggactaaagtgcctccatttgaaaacattgaactttacaatgttatgtgcgatctcctaggcttgaagcccgctcccaataatggaactcatggaagcttgaatcacctactgcgtacaaatacctttaggccaaccatgccagacgaagtcagccgacctaactacccagggattatgtaccttcagtccgagtttgacctgggctgcacctgtgacgataaggtagagccaaagaacaaattggaagaactcaataaacgtcttcataccaaaggatcaacagaagctgaaaccgggaaattcagaggcagcaaacatgaaaacaagaaaaaccttaatggaagtgttgaacctagaaaagagagacatctcctgtatggacggcctgcagtgctctatcggactagctatgatatcttataccatacggactttgaaagtggttatagtgaaatattcttaatgcctctctggacatcgtataccatttctaagcaggctgaggtctccagcatcccagaacacctgaccaactgtgttcgtcctgatgtccgtgtgtctccaggattcagtcagaactgtttagcttataaaaatgataaacagatgtcatatggattcctttttcctccctacctgagctcctccccagaagctaagtatgatgcattcctcgtaaccaacatggttccaatgtaccccgccttcaaacgtgtttgggcttatttccaaagggttttggtgaagaaatatgcttcagaaaggaatggagtcaacgtaataagtggaccgatttttgactacaattacgatggcctacgtgacactgaagatgaaattaaacagtatgtggaaggcagctctatacctgtccccacccactactacagcatcatcaccagctgcctggacttcactcagcctgcagacaagtgtgacggtcccctctctgtgtcttccttcatccttcctcaccgacccgacaatgatgagagctgtaatagctccgaggatgagtcgaagtgggtagaggaactcatgaagatgcacacagctcgggtgcgggacattgagcacctcactggtctggatttctaccggaagactagccgtagctattcggaaattctgaccctcaagacatacctgcatacatatgagagcgagatttaactttctgggcctgggcagtgtagtcttagcaactggtgtatatttttatattgtgtttgtatttattaatttgaaccaggacacaaacaaacaaagaaacaaacaaataaaaaaaaaaaccacttagtattttaatcctgtaccaaatctgacatattaagctgaatgactgtgctattttttttccttaattcttgatttagacagagttgtgttctgagcagagtttatagtgaacactgaggctcacaatccaagtagaagctacgtggatctacaaggtgctgcaggttgaaaatttgcattgaggaaatattagttttccagggcacagtcaccacgtgtagttctgttctgttttgaaagactgattttgtaaaggtgcattcatctgctgttaactttgacagacatatttatgccttatagaccaagcttaaatataataaatcacacattcagatttt

SEQ ID NO: 292 - DNA, 3216 bp, Homo sapiens; identical to SEQ ID NO: 291

SEQ ID NO: 293 - DNA, 2777 bp, Homo sapiens
gaaagaaagagccttattttctggctaaacaggtttacacagctacaggaacaatggattccaggctagctttagccacggaggagcccattaagaaagacagcctgaagagatataagatcctttgtgcggttcttcttgctttgctggtgatcgtgtcgcttggattgggcctgggcctgggactcaggaaacctgaagagcatataggcagctgcaggaaaaaatgctttgattcgtcacacagaggactggagggttgccgctgtgactccggatgcacagaccggggagactgctgctgggactttgaagatacctgtgtgaaatcaactcaaatctggacgtgtaattcgttccgctgtggggagaccagactagaggcagccctctgttcctgtgcggatgactgtctgcagagggaggactgctgcactgactacaaggctgtgtgccaaggagaagtcccatgggtgacagaagcctgtgcctcatcccaggagccccagtgtccagaagggtttgaccagccgccggttatcttgttctccatggacggctttagagctgagtacttacaaacatggagcaccctgctgccaaacattaacaaactgaaaacatgtggactccattccaaatatatgagagcagtgtatcccaccaaaacctttccaaatcattataccattgtcacgggtttgtatccagagtcgcacggcatcattgacaataacatgtatgatgtgtacctcaacaagaatttttcactttcttcagtggagaaaagtaaccctgcctggtggagtgggcagccgatttggttaacagcaatgtatcaaggcttaaaagctgcttcctactactggccaggatcagatgtggctgtcaatggctccttccctaacatctacaggaattacagcaattccgtcccatatgaaagtaggattgctacactgttgcaatggctggacctgcccaaagctgaacgacccagtttttacaccatatatgtggaagagcccgattctgcggggcacaagagtggaccagtcagtgctggagtcattaaagccttacagttagttgatgatgcctttgggatgttgatggagggtttgaaacagaggaatttacacaactgtgtcaacataatcgttctggctgatcatggaatggaccagacctcttgtgacagagtggaatacatgacagattattttcctgaaataaacttctacatgtaccaaggacctgcccctcgaatcaggactcgtaatatacctcaggacttctttacctttaattccgaagagattgtcagagacctcagctgtcgaaaatccgatcaacacttcaaaccctacttgactccggatttgccgaaacgactgcactatgccaagaacgtcaggattgacaaagttcatctaatggtggatcggcaatggctggcttacaggaacaaagggagttccaactgcgaaggcgggacacacggttacaacaatgaatttaaaagtatggaggcaatctttttggcacatggacccagctttaaagagaagactgttatcgaaccatttgaaaacatcgaagtctataatctactgtgtgatcttctgcacatccaaccggcaccaaacaacggttctcacggtagcctgaatcatcttctgaaggcaccattttaccagccgtcgcatgcagaagaattgtcaaagtctgctggctgtggttttactactccattgcctaaggactcactaaactgctcctgcctcgcactgcagacttctggtcaagaagagcaagtcaaccaaagactaaatctcaatagaggagaggtctcggcaacagagaagacaaatttgccatttgggaggcccagggtgatacagaagaacaaagaccactgtctgctttaccacagggaatacgtcagtgggtttgggaaagctatgaagatgcccatgtggagttcatacactgttcccaagccgggagacacatcatctcttcctcccacagttccagactgtctgcgggctgatgtcagggttgatccttcggagagccaaaaatgttccttctatttagcagaccagaatatcgaccatggcttcctctatcctcctgcaatcaaaggaaataatgagagtcaatatgatgctttaattacaagtaatttggtcccaatgtataaagaattcaaaaaaatgtgggactacttccataaagttctccttataaaatacgctatagaaagaaatggagtgaatgtggttagtggacccatatttgattacaattatgatggccattttgatgcccccgatgaaatcacaaactatgtagctggcaccgatgttcctgtcccgacacactactttgtggtactgacaagctgtaaaaacaaaacccacacacccgacagctgccctgggtggctggatgtcctgccctttgtcgtccctcaccggcccaccaacgtggaaagctgtcctgaaaacaaagcagaagacctttgggttgaagagagatttaaagcacacatcgcccgggtccgtgatgtggagctcctcactggccttgacttttatcaggaaaaaacacagcccgtctctgaaattttgcagctgaagacatatttgcccacattcgaaaccattatttgaatagatgtgtaaagccatttgacaaaatggaaacattttctgtcaagaaattataaaataaaattttctatttttctttaaaaaaaaaaaaaaaaa

SEQ ID NO: 294 - DNA, 900 bp, Homo sapiens
tggagcggcggcggcttgagctcgcgcgtccgcagtgatgagctacgaccgcgccatcaccgtcttctcgcccgacggccacctcttccaagtggagtacgcgcaggaggcggtcaagaagggctccaccgcggttggtgttcgaggaagggacattgttgttcttggtgtggaaaagaagtcggtggccaagctacaagatgaaagaacggtccggaaaatctgtgctctggacgataatgtctgcatggcctttgcagttgtagcctctgtctcaggtctcactgccgatgcaaggatagtcatcaacagagccagggtagagtgccagagccaccggctgaccgtgggggacccagtgactgtggagtacatcacccgctacattgccagtctgaagcagcgttacacacagagcaatgggcgcaggccatttggtatctctgccctaattgtgggtttcgacttcgatggcacccccagactctatcagactgacccctcaggcacataccatgcttggaaggccaatgccataggccggggtgccaagtcggtgcgtgaatttctggagaagaactacacagatgatgccattgaaacagacgatctgaccatcaaactggtgatcaaggcgctgctggaagtggtccagtcaggtggcaaaaacattgaacttgctgtcatgaggcgggatcagcccctcaagattctaagtcctgaagaaattgagaagtatgttgctgaaatcgagaaggagaaagaagaaaatgaaaagaagaaacaaaagaaagcatcatgagggcagcggtcagagcagctttgagcctccatccgagcaaacgggtgctgtgggccttgtggccatttgtcggagtccaataaactactacgtttttt

SEQ ID NO: 295 - DNA, 900 bp, Homo sapiens; identical to SEQ ID NO: 294

SEQ ID NO: 296 - DNA, 2343 bp, Homo sapiens
ggcacgagctgaagtcactgggtgtgtgagagggagtagctcagagccctgcagcttcaggagtgctcactgttgccttccctccccactaggatggcttgccttcttcctgctgctcgacttcctgcaggctttctcttcttagtgctctggggctcagttctaggtgacaagctgctggtggtcccccaggatggcagccactggcttagcatgaaggagatagtggagcacctcagtgaacgcggacacgacattgtggtgctagtgccagaagtcaatttgcttttgggagaatccaaatactacaggaggaaaagcttcccggtcccctacaacctagaagagttgcggacccgctatcgctcctttgggaacaaccactttgctgccagttcccccctgatggctcctctaagagagtacaggaacaacatgattgtcattgacatgtgctttttcagctgccagagcctcctgaaggactcggccaccctcagcttcctcagggagaaccagtttgatgctctgttcacagacccggccatgccctgtggtgtgatcctggctgagtatctcaagctgccttccatctacctcttcagaggtttcccatgctctctggagcacatgcttggtcaaagcccaagccccgtatcctatgttcccagattctacaccaaattctcagaccacatgacatttccccaacggctggccaacttcattgctaacatcttggagaactacctttatcattgtctgtactcaaagtatgagatccttgcctcagacctcctcaagagagatgtgtccctacctgccttacaccagaactctctgtggctgttacggtatgattttgtgttcgaatacccccggccagtcatgcccaacatgatcttcattggagggaccaactgcaagaagaaggggaacctgtctcaggaatttgaagcctatgtcaacgcctccggagaacatggcatcgtggttttctctttgggatccatggtctcagagattccagagaagaaagcgatggaaatcgctgaggctttgggcagaattcctcagacggtcctgtggcgctacaccggaactagaccatcgaaccttgcaaagaacactattcttgtcaaatggctaccccaaaacgatctgcttggtcatccaaaggctcgggcgttcatcacacactccggttcccatggtatttatgaaggaatatgcaatggggttccaatggtgatgatgcccttgtttggtgatcagatggacaacgccaagcgcatggaaactcggggagctggggtgaccctgaatgtcctggaaatgactgccgatgatttggaaaacgcccttaaaactgtcatcaataacaagagttacaaggagaacatcatgcgcctctccagccttcacaaggaccgtcctatcgagcctctggacctggctgtgttctgggtggagtacgtgatgaggcacaagggggcgccacacctgcgccccgccgcccacgacctcacctggtaccagtaccactccttggacgtgattggctttctcctggccatcgtgttgacggtggtcttcattgtctataaaagttgtgcctatggctgccggaaatgctttgggggaaagggtcgagtgaagaaatcacacaaatccaagacccactgagaagtggcaggaagtgaaggagaagtattagtcccttatccaatcagttgaaacttggaaacaagtgttaaatccatgttgcttttattagggaaataattcaccatacactatacacccagaacatttttttttctttttctttttttcggagctggggaccgaacccagaacattttttttttaaataaaaacaatctaattgctggccacacccatcagggaagatactggaatatgtgatctgtttctccagtatcttcagtctggacaatgactgccatctgttggtaacttacagaaagtttagtgttctgttctgccttcagtgacagcaccacagtttcccttactcctgtcagctaatggcttcctcccctggattctcagaccagtgtggccttcccagtgttagtcattcctcactgtgctcatgttttgtgggtggcacggcctttgagctttgggagaaaacaagatgaggctgtgacactggtggccctgtgtttgagataataattattgcttgtctctgaatttgatgaaaactgaagtacattctaaagaaagtatgtcttctattgtgttcccaaaccaagaacttgtcaataaattcatataaattgtattattacttttaaaaaaaaaaaaaaaaaa

SEQ ID NO: 297 - DNA, 2301 bp, Homo sapiens
gaattcggcacgagctgtcttgccttggtctgcacttctcccatggctcctgcagacattccagcctctcttcctctcggtctgtgcctgctgctggcctctggctttgggcatgcaggcaagctgctggtggtgcccatggatggcagccactggttcaccatgcagatggttgtggagaagctccttcccaaaggccatgaggtggtggtggttgttccagaggtcagttggcagctgggaaaaccactgaattttacggtgaaaacgtattcagtttctcacactcaggaggatttaaatcgggagttcaagttttttattgattctcagtggaaaactcaacaagagggcggagttcttcctctactgactagccctgcccagggtttcttcgaattactgttttcacactgtaggagtttgtttaaggacaagaagttagtggagtacttgaagcagagttcgtttgatgctgtgtttctggatccttttgatgtgtgtggcttaactgttgccaagtacttttctctcccgtcagtggtcttcagcagggggatattttgtcactatcttgaagaaggctcccagtgccccagtcctccttcatatgtccccagaggtatcttgaaactcacagataccatgactttcaaggaaagagtgtggaaccttctttcctacatgggggagcatgcattctgtcccagttttttcaaaactgctaccgacattgcctctgaagttctccagaccccggtgactatgacagacctcttcagcccagtgtccgtttggttgttacgcacagacttcacgttggaattacccagacctgtgatgcccaatgtgatccacattggagggatcaactgccaccaaaggaagccactttccaaggaatttgaagcctatgtcaacgcctccggagaacatggcatcgtggttttctctttgggatccatggtctcagagattccagagaagaaagcgatggaaattgctgaggctttgggcagaattcctcagacggtcctgtggcgctacaccggaactagaccatcgaaccttgcaaagaacactattcttgtcaaatggctaccccaaaacgatctgcttggtcatccaaaggctcgggcgttcatcacacactccggttcccatggtatttatgaaggaatatgcaatggggttccaatggtgatgatgccttggaaaacgcccttaaaactgtcatcaataacaagagttacaaggagaacatcatgcgcctctccagccttcacaaggaccgtcctatccttgtttggtcatcagatggacaacgccaagcgcatgcaaactcggggagctggggtgaccctgaatgtcctggaaatgactgccgatgatgagcctctggacctggctgtgttctgggtggagtacgtgatgaggcacaagggggcgccacacctgcgccccgccgcccacgacctcacctggtaccagtaccactccttggacgtgattggctttctcctggccatcgtgttcacggtggtcttcattgtctataaaagttgtgcctatggctgccggaaatgctttgggggaaagggtcgagtgaagaaatcacacaaatccaagacccactgagaagtggcaggaagtgaaggagaagtattagtcccttatccaatcagttgaaacttggaaacaagtgttaaatccatgttgcttttattagggaaataattcaccatacactatacacccagaacatttttttttctttttctttttttcggagctggggaccgaacccagaacattttttttttaaataaaaacaatctaattgctggccacacccatcagggaagatactggaatatgtgatctgtttctccagtatcttcagtctggacaatgactgccatctgttggtaacttacagaaagtttagtgttctgttctgccttcagtgacagcaccacagtttcccttactcctgtcagctaatggcttcctcccctggattctcagaccagtgtggccttcccagtgttagtcattcctcactgtgctcatgttttgtgggtggcacggcctttgagctttgggagaaaacaagatgaggctgtgacactggtggccctgtgtttgagataataattattgcttgtctctgaatttgatgaaaactgaagtacattctaaagaaagtatgtcttctattgtgttcccaaaccaagaacttgtcaataaattcatataaattgtattattacttttaaaaaaaaaaaaaaaaaactcgag

SEQ ID NO: 298 - DNA, 2284 bp, Homo sapiens
ggcacgagggagagctaccatgtccgtggtgtgccggagctcatgttcgcttctgcttcttccgtgccttctgctgtgtgtgttgggtccctctgcgtcccatgctgggaagctgttagtgatccccatagatggcagccactggctgagtatgctcggagttattcagcagctccagcaaaaggggcacgaagtggtggtcatagcacctgaagcttcgatacacataaaagaaggatcattttacactatgaggaagtaccctgtgccattccaaaatgaaaacgtgacagctgcttttgtggaacttgggcggagtgtctttgatcaagatccttttctgctgcgtgtggttaaaacatacaacaaagtcaaaagggactccagtatgctgctgtctggctgctcccaccttctgcacaatgccgagtttatggcctctctggaacaaagccactttgatgctctgctgacagaccctttccttccgtgcggctccattgtggcccagtacctgtctctgcctgctgtgtacttcttgaatgcattgccatgcagcctggatttggaagccacccaatgccctgctccgttgtcctacgtgcccaagagtttgtcctcgaacacagatcgcatgaacttcctgcagcgggtgaagaacatgattattgctttgacagagaactttctatgcagagtggtttactccccctatgggtcacttgccactgaaatcttacagaaagaggtgactgtcaaggaccttctgagtcctgcatctatctggctgatgagaaatgactttgtgaaagattaccccaggcccatcatgcccaacatggtttttattggtgggataaactgccttcagaaaaaagccctatcccaggaatttgaagcctatgtcaacgcctccggagaacatggcatcgtggttttctctttgggatccatggtctcagagattccagagaagaaagcgatggaaatcgctgaggctttgggcagaattcctcagacggtcctgtggcgctacaccggaactagaccatcgaaccttgcaaagaacactattcttgtcaaatggctaccccaaaacgatctgcttggtcatccaaaggctcgggcgttcatcacacactccggttcccatggtatttatgaaggaatatgcaatggggttccaatggtgatgatgcccttgtttggtgatcagatggacaacgccaagcgcatggaaactcggggagctggggtgaccctgaatgtcctggaaatgactgccgatgatttggaaaacgcccttaaaactgtcatcaataacaagagttacaaggagaacatcatgcgcctctccagccttcacaaggaccgtcctatcgagcctctggacctggctgtgttctgggtggagtacgtgatgaggcacaagggggcgccacacctgcgccccgccgcccacgacctcacctggtaccagtaccactccttggacgtgattggctttctcctggccatcgtgttgacggtggtcttcattgtctataaaagttgtgcctatggctgccggaaatgctttgggggaaagggtcgagtgaagaaatcacacaaatccaagacccactgagaagtggcaggaagtgaaggagaagtattagtcccttatccaatcagttgaaacttggaaacaagtgttaaatccatgttgcttttattagggaaataattcaccatacactatacacccagaacatttttttttctttttctttttttcggagctggggaccgaacccagaacattttttttttaaataaaaacaatctaattgctggccacacccatcagggaagatactggaatatgtgatctgtttctccagtatcttcagtctggacaatgactgccatctgttggtaacttacagaaagtttagtgttctgttctgccttcagtgacagcaccacagtttcccttactcctgtcagctaatggcttcctcccctggattctcagaccagtgtggccttcccagtgttagtcattcctcactgtgctcatgttttgtgggtggcacggcctttgagctttgggagaaaacaagatgaggctgtgacactggtggccctgtgtttgagataataattattgcttgtctctgaatttgatgaaaactgaagtacattctaaagaaagtatgtcttctattgtgttcccaaaccaagaacttgtcaataaattcatataaattgtattattacttttaaaaaaaaaaaaaaaaaa

SEQ ID NO: 299 - DNA, 858 bp, Homo sapiens
atgggactccatgtgaccctgcaaggattagctgggctgctgctgctgctgtatgccctgccctgggctgaaggtggaaaggtgctggtgtttcccatggagggcagccactggctgagcatgagggatgtcgtgagggaactccacgcccgaggtcaccaggctgtggtcctggctccagaggtgactgtgcacatcaaagaagaggacttcttcaccctccaaacctaccctgttccatacacaagacaaggatttagacaacaaatgatgcgaaacattaaagtggtctttgaaacaggcaactatgtgaagacattccttgaaacatccgagattttgaaaaacatatcgacagttctcttaaggtcttgtatgaatctattgcacaatgggtccctgctccagcatctgaattccagctcctttgacatggtcttaacagatcctgtgattccgtgtgggcaggtgctggccaagtacttgggtatccccactgtgttctttctacgatacattccctgtggcatagactctgaggccacacaatgtccgaaaccttcctcttatattccgaacctactcacaatgctttctgaccacatgactttcctgcaaagggtcaagaacatgctgtaccctctggccttgaagtacatttgccatttctcattcactcgctatgaaagcctggcctctgagcttttgcagagagaagtgtctttagtggaggttctcagccatgcatctgtgtggctgttccgaggggactttgtgttcgactacccgaggcctgtcatgcctaacatggtcttcattggaggcataaactgtgtcatcaagaagcctctttctcag

SEQ ID NO: 300 - DNA, 1879 bp, Homo sapiens
aagactttttccccagccttaactggatagtctgaagttttcaaaactcttatccacaaagttgtcagaaccttgattgggaagtcctgtgcatctgtgctaacctacagggcctccttatccagagcactctgcatttcagagggtcgctgtcgaactacggttttggcgaagacattcctgaagaattgtctgaggtttcctctgcaaaaatggccaagctgacagctgttcctctcagtgcacttgttgatgagcctgtgcatatccgggtcacaggcctgacccccttccaggtggtgtgccttcaggcatcactgaaagatgataagggaaacctgtttaattctcaggccttctacagggccagtgaagtgggtgaggtagatctggaacgtgattcctctcttggaggagactacatgggggtccaccccatgggtcttttctggtccatgaaacctgaaaagctattgactagattggtaaaaagagatgtgatgaataggccccacaaagtccacataaaactttgccatccatactttccagtagaaggcaaagttatcagttcctccttggatagtctgattctggaaaggtggtatatggcacctggtgtcactaggatccatgtaaaggaaggccgaatccggggagccctgtttctgcctccaggagaaggtcctttcccaggggtcattgacttgtttggaggagctggtggactgtttgagttccgggccagcctcctggccagtcatggctttgccactttagctctggcttactggggctatgatgacctgccctctcgactggagaaggtagatctagagtattttgaagaaggtgtagagtttctcctgagacatcctaaggtcctgggcccaggggttggcatcctttctgtgtgcattggagcagagattggactttctatggctattaacctaaaacagataacagccactgtacttataaatgggcctaattttgtttctagcaatccacatgtatatcgtggtaaggtcttccagcctacaccctgcagtgaagaatttgtaaccaccaatgctttgggacttgtagagttctatcgaacctttgaggaaactgcagataaggatagcaaatactgttttcccattgaaaaagctcacggacattttcttttcgtggtgggagaagatgataagaacctcaacagcaaagtgcatgctaagcaagccatagcccagctgatgaaaagtggaaagaagaactggactctgctgtcttaccctggggcaggtcacctgattgagcctccctactccccactgtgctcagcctcaaggatgccctttgtaatcccaagcatcaactggggaggagaggttatcccacacgcagctgcgcaggaacattcttggaaggagatacagaaatttctcaagcagcatcttaatccaggtttcaacagtcagctgtgagtggacttgattatattactggaaagaggagctgggcatctcctggccagctccactcctcacttccatagaggaatgtctttaatctcttatcacatgaggaagaagagtaccaccagaaaatgccgaaggacagagagtgataacctcatgactttggaaggggagacatgttttccatggaataaaatgtccctcagtgagagtcctatatctgtataaataaaatcttagggttttcctaaaatgttcaacaccacagcaactttctgtgatgataattatcaaggaaattatcactgataatccacaggatactttagtttataaaagagacatgaaaagaattatatattgttacttattaatttcttaaaactcacattaaatatgcttagatcatc

SEQ ID NO: 301 - DNA, 846 bp, Homo sapiens
cgttgctgtcgggcgctggccagcgtgttgcagcggccgatgccggtgaatcagcacgggttttttggactcggaggtcgtgcagatctgctggacttgggtccggggagtcctggtgatgggctgagcctagccgcgccgagctggggtgtcccggaggagccacgaatcgaaatgcttcatggaaccaccaccctggccttcaagtttcagcatggagtcattgttgcagcggattcccgggccaccgcaggtccctacattgcttcccagacagtgaagaaagtgatagagatcaacccttaccttctgggcaccatggctgggggtgcagcggattgcagcttctgggagcggttgttggctcgacagtgtcgaatctatgagcttcgcaacaaggaacgcatctcggtcgcggcggcctccaaactgcttgccaacatggtgtatcagtacaaaggcatggggctgtccatgggcaccatgatctgtggctgggataagagaggcccgggcctctactatgtagacagtgaggggaacaggatctctggaaccgccttctcagtgggatctggctccgtgtatgcgtttggagtcatggatcgaggctactcctatgacctacaagtggaggaggcctatgacctggcccgccgagccatctaccaagccacctacagagatgcctactccggaggagcagtcaacctctaccatgtgcgggaggatggctggatccgtgtctccagtgacaatgtagctgacttacatgacaagtatacttcatctatcccctgagggaaggtggagtgccctggttataataaataatagtacccgttc

SEQ ID NO: 302 - DNA, 846 bp, Homo sapiens; identical to SEQ ID NO: 301

SEQ ID NO: 303 - DNA, 806 bp, Homo sapiens
tgcgaaagctggggctgctatcccagattcgagagctggcaagtggggaagcatggccaagccttgtggggttcgcttgagtggagaagcccgtaaacaggtggatgccttcagacaaaatcttttccaggaggctgaggacttcctttgcactttcttgccacggaaaatcatatccctgagtcagctcttgcaagaggattccctcaatgtggctgacctctcctccctccgggctcctctggacatccctatcccagatcccccacccaaggatgatgagatggaaaccgagcaggagaagaaagaagtccctaagtgtggcttcctccctgggaatgagaagcttctggccctgcttgccttggttaagccagaagtctggactctcaaagagaagtgcattctggtaatcacatggatccagcacctgatccccaagattgaggacggaaatgattttggggtggcaattcaggagaaggtgctggagagagtgaatgctgtcaagaccaaagtggaagccttccagacagccatctccaagtatttctcagagcgtggggatgctgtagccaaggcctccaaggacacccatgtaatggattaccgggccttggtgcacgagcgagatgaagcagcctatggggcgcttagggccatggtgctggacctgagagccttctatgctgagcttcatcacatcatcagcagcaacctagagaaaattgtcaacccaaagggtgaagaaaagccatctatgtactgagcaaaggattagaaggaaaataaatgatttatacttt

SEQ ID NO: 304 - DNA, 1304 bp, Homo sapiens
gaattccgtctggcctccttccctcccctgggtaccctcttactgtctgccacctctcggctacctccactgagtgcccaggagtcactgaaactcctggtctctgggatatcaccttaaacaccacctgagttgtctgaggaaggactcttggcaaagcagggtcagagtgactttgctggccctgcaatccgagcgtcccctaggccatggctgccccacagcttttccgagctctggtatctgctcagtgggtggcggaggctctgaaatcccctcgcgcctctcagccgctgaagttactggatgcgtcctggtacctacccaagctgggccgcgatgcgcgacgcgagtttgaggagcgccacatcccgggcgccgccttctttgacatcgatcgttgcagcgaccacacatcgccctacgaccacatgctgcctagtgccacgcatttcgccgactacgcgggcagcttgggcgtgagtgccgctacacacgtcgtgatctacgacggcagcgaccagggcctctattccgctccgagggtctggtggatgttccgcgccttcggccaccactctgtgtcgttgctggacggcggcttccgctattggctgagccagaacctgccaattagctctggcaaaagcccctcggaacctgcggagttctgcgcgcagctcgatccctccttcatcaagacccacgaggatatcctggagaacttggatgcccggcgcttccaggtagtggacgcccgcgcagctggccgtttccaaggcacacagccagaaccccgagatggcatcgaacctggacacatccctggctcagtaaacatcccattcactgaattcctgaccagtgaaggtctggagaagagcccagaggagatccaacgcctgttccaggagaagaaggtggacctgtccaagcccttggtagccacatgcggctccggtgtcacagcctgccacgtggtcctgggggccttcctctgtggcaaacccgatgtgcctgtctacgatggctcctgggtggagtggtacatgcgtgcccaaccggagcacgtcatctctcagggccgggggaagaccctgtgaaggacacagtgcagcttgggtgacaccgaaccatcctagtgccagcctggtcactctgaccctgctttgccaagagtccttcctcagacaactcaggtggtgtttaaggtgatatcccagagaccaggagtttcagtgactcctgggcactcagtggaggtagccgagaggtggcagacagtaagagggctgccggaattc

SEQ ID NO: 305 - DNA, 976 bp, Homo sapiens
gtctggactgcagacaggcggcacggagagaccggcgagctccgatcggtcggagctaaccgctgccaggcggctgccgcggccccgcacacgccccagtcgagcgaagatggtgggccggaacagcgccatcgccgcggggctgtgcggtgccctcttcatagggtactgcatctactttgaccgcaaaaggcgaggtgaccccaacttcaagaacaggcttcgagaacgaagaaagaaacagaagcttgctaaggagagagctgggctttccaagttacctgatttaaaagatgctgaagctgttcagaaattcttccttgaagagatacagcttggtgaagagttattagcacaaggtgactatgagaagggtgtggaccacctgacaaatgcaatcgctgtgtgtggacagcctcagcagttgctgcaagtgttacaacagactcttccaccaccagtgttccagatgcttctgaccaagcttccaaccattagtcagagaattgtcagtgctcagagcttggctgaggatgatgtggaatgagccagacaccaacatgataaatctcagtaaaatgataacagttagctgcaggctgctctgctcggggggataagggcaaactgtgcttgtcatgaactgtctcacactgacatctccaaagtgaacctgaactttggtagagccattgtctgttctatttatttttccagtgagaagtattttgatagcttttcattttataaatacactgcgttaaccaaaagatcatggatttcgtttgttcttgacatgcagttcaatgtaaatacagtagtattaggtagagactcctggtgattttaaaggattgaaaagctgaggaatagttgaataatgcacattttaaagactagaacattttattgtcgttgtaaaattgagtagaaacttgtgtttgtgaaaactgagcattaaaaccttacagagaca

SEQ ID NO: 306 - DNA, 2343 bp, Homo sapiens; identical to SEQ ID NO: 296

SEQ ID NO: 307 - DNA, 1072 bp, Homo sapiens
ggcacgagggaaggaagtctctctgtggaggtctgagggaagagctcgcgccaggtagacgctgcgccgtcatcatgggcaagggggaccccaacaagccgcggggcaagatgtcctcgtacgccttcttcgtgcagacctgccgggaggagcacaagaagaagcatcccgactcgtcggtcaacttcgccgagttctcgaagaaatgttcggagagatggaagaccatgtctgccaaggaaaagtcgaagtttgaggatttggccaagagcgacaaagctcgttatgacagggagatgaagaactatgttcctcccaaaggtgataagaaaggaaagaaaaaagatccaaatgctcccaagagaccaccgtctgccttcttcctgttttgctctgaacatcgcccaaagatcaaaagtgaacaccccggcctgtctattggagatactgcaaagaaactgggggagatgtggtctgagcaatctgccaaagataaacaaccgtatgagcagaaagcagctaaactaaaggagaagtatgaaaaggatattgctgcataccgtgccaagggcaaaagtgaagtaggaaagaagggtcctggtaggccaacaggctcaaagaagaagaatgaaccagaagatgaggaagaggaggaggaggaagaagatgatgaagatgaagaggaggaagatgaggatgaagaataagtatctgtcctaaagtgtggagtatatgtgctcaggcaattattttgctaagaatgtgaaattcaagtgcagctcaacattagcttcagtataaaaactgtacagatttttgtatagctgatgagattctttgtagagaaaatactttttaaaaagggtttgtagctttttcaggggctacaacgtacagttagatttaaagcttttgatgttgaatgtttctaaatatttaatggtttctttaatttcttatgatagcaaaaaaaaaaacttcataggaatttctattaccagtaaaagaattttttttttaggatgttgcatttttgtttttttttaaaatttgtaataaaataatgtatatt

SEQ ID NO: 308 - DNA, 4358 bp, Homo sapiens
aattcccgcagtggagggagggtcagtgtgcgggagactgaggccagaaagcgttgccatggcgggtgtgctgagcagggacgcgccggacatcgagagtatcctggctttaaatcctcgaatacaagctcatgcgactcttcgttccaccatggccaagaaactagacaagaaacattggaaaaggaacactgataagaactgctttatctgtgagaagctggagaataattttgatgacatcaagcacacgactcttggtgagcgaggggctctccgagaagcagtgagatgcttgaaatgtgcagatgctccctgccagaagagttgtcccacgtctcttgacattaagtcattcatcacaagtatcgccaacaagaactactatggtgcagctaagctgattttttccgataatcctcttggtcttacttgcggaatggtttgtccaacatctgacctctgtgtcggaggatgcaacttacatgctactgaagaggggccaattaatattggtggactgcagcagtttgctaccgaggtgttcaaagcgatgaacatcccacagatcagaagcccgttgctgcctcctccggaacatatgccggaagcttactcagcaaaaattgcgctgtttggagctgggcctgcgagtataagctgtgcctcctttctggctcgactgggctattccgacatcaccatatttgaaaagcaagaatacgttggtggcttaagcacttctgaaatccctcagtttcggctcccatatgatgtcgtgaattttgagattgagctcatgaaggaccttggtgtcaagataatttgtggtaaaagcatttccacagatgaaatgactcttagtactttgaaagaaaatggctacaaagctgcttttattggaataggtttgccagaacccaaaaaggaccatattttccaaggcttgacacaagtccagggattttacacatccaaagactttttgccacttgtcgccaaaggtagcaaaccaggaatgtgcgcctgtcactctccattgccatccgtgaggggagccgtgattgtactcggagctggggacactgcgtttgactgtgcaacatccgctctgcgctgcggagcacgtcgcgtgttcatcgtcttcagaaagggctttgctaatattcgagctgttccagaggagatggagcttgctaaggaagagaaatgtgaatttttgcctttcctttccccacggaaggttatagtcaaagatggaaagattgtaggaatgcagtttgttcgaactgagcaggatgaaaccggaaactgggtcgaagatgaagagcagatagtgcgtttgaaggctgatgtggttattagcccctttggatctgtcttggatgatcccaaagtgatagaagcattgagtcccatcaagtttaacagatggggtctccctgaagtaaacccagaaaccatgcaaaccagtgagccatgggtatttgcaggtggtgatgttgtgggtatggctaacaccacagtggaatctgtcaacgatggaaaacaggcttcatggtacattcacgagtacatacaggcacaatatggagccttggtgccttcccagcctacactgcccctgttttacactcctgttgacctcgtggacatcagtgtggaaatggcagggttgaggttccccaatccctttggccttgccagtgcgacaccagccactagcacaccaatgattcgaagggcctttgaagcaggatggggttttgctttgaccaaaactttctctcttgataaggacatcgtgacaaacgtctcacccagaatcatccgagggaccacttctggccccttgtatggccctggacaaagctctttcctcaacattgagctcatcagtgagaaaacagctgcatattggtgtcacagtgtcaccgaactaaaggctgacttcccggacaacatcctgatcgccagcatcatgtgcagttacaacaaaaatgactggatggaactctccaaaatggctgaggcttctggagcagatgccctggagttaaatttatcctgtccacatggcatgggggagagaggaatgggtctggcttgtgggcaggatccagagctggtgaggaacatctgtcgctgggtgagacaatctgttcgggttccattttttgccaagttgaccccaaatgtcactgatattgtaagcatcgcaagagcagcaaaggaaggtggtgcagatggcgttacagccaccaacactgtctcaggcctgatgggactgaaagctgatggttcaccctggccttcggtgggcagtggaaagaggactacatatggaggagtatcaggaactaccatcaggcctattgctttgagagctgtgaccgccattgcccgcgctttgcctgggtttcctatactggccacaggtggaattgactcagctgaaagtggacttcagtttcttcatagtggtgcttcagttctccaggtatgcagtgctattcagaatcaggacttcactgtgattgaagattactgcactggcctcaaagctctgctttatctgaagagtattgaagagttatcagactgggatgggcagagtccacccactatgagtcatcagaaagggaaaccagttccacacattgctgagctcatgggacagaaacttccaagctttggaccgtaccttgaacggcgcaagaaaatcctagcagcaagtaaaatcagagagaatgatcaaaacagagcttgctcacctctccagagaaagcactttaactcccaaaagccgattcctgccatcaaggatgtaattggaaaatcactgcaatacctggggacgtttggtgagctgaacatcatggagcaagttgtggccctgatcgatgaggaaatgtgtatcaattgcggcaaatgttacatgacctgtaatgactctggctaccaggctatacagttcgatccagaaactcacctgcctactgttagcgacacatgtacaggctgcactctctgcctcagcgtctgccctattatggactgtatcaggatggtttccagggcaacaccttatgaaccaaagagaggcctaccattagccgtgaagccggtgtgttaaggtgatttgtaagacagctgctgtgaactttgatgttaccaacacaggctgatctttaaaacaataacaattgtaatcattatgatcagttctttccaaatttgatagctatgcatatataatttctaaataagcgtctaaattggaaaacaatgtctaatgccagtgaccaattaatggtcataaaatggaataattcttctctgaagtagctggtgagtaactgtggaccagttaattggatatgctcggtcagttgtctgctgtgaaaaattaactttttcatggcaattagtgtgacaatttctaaattgccctatgccgtgctcactctttgatttctaattgtaagcgaaatgaactattttggaacggagtgcgctttcatatacaggaaactgtttccaaggaaacactttgtaattaaaaattacctgtaattttaacactgcttctaaggacatgcaattagccccattaagaacaattgaagagagtcacgtcattatttactatgacaaggggaacacaacctggcagagggttttctagagttttcttacatccccctttgctgaagtaactcactctttggtgctggacactggaagggagattatttcctgactaaaatactgttcaccactcatccctgaaacaggtgtcagactgcccaggaatggagcacaggtcatttttatttgaatagcaaagctgtgctcctgatgaaataagatataaagatggatatctagtgaaggccacactgtcactgggcacagaccactcggtctgcttctcatagtcaccttcattatgagagcaattaacgttcaaacaagggctagattacacagcactgagccataggcttcacgctacaacagcaaaaacatcgtatctgaaatttatacataatgagacaaatgggtctgacgacgcttgaatgctcgtatgatttcaaaattgttgaaatcgacgtgtacttttaaatattgataaatattttctgtctctttatttttataatcaataaatagcatcatatgaactcatttattccttctttatgacatactttaaaatgaatctataggaaataagtgagaaataacagtctgtggcatatttctatgataaatgcacgatatctgcaagtgcactttaaaaatgtgtatgactaaataatcacaaataaaattttatgatttattgtggaatt

SEQ ID NO: 309 - DNA, 4358 bp, Homo sapiens; identical to SEQ ID NO: 308

SEQ ID NO: 310 - DNA, 2963 bp, Homo sapiens
gacacagtactgccgatgttggacagaggatcgcttaacagaacgaaatctcaaaacaaattaacaggacccggttgcttgatttcccaaatcagaaaaggctcgaaatgtctagaggggctgactgatgcagcggtgacccggactggagacagttggacgcgatcatctctggtgcttttgttcaaccttgaaaccttcgccacaggagacttgcctgagcagagaagcaaacgtggagaaacaaagagagatctagcgaaaagcctctgggaccaaggaggggaggtgggactctgggttggcggtggcacctgctgccggctattaataatagggtcgcgatgcgtttataaggtgtttgattaaacaaagactctatgagagaagaataactagcaacagccccacgtctgagtcgtcgcctccgacctttttcaacgtgggttctttgggccgagcgtcgtttgccgagaactagatctcacctgaccccagacgctgaaaacaagcgctgtggcatcctgggccacccaagctgacaagggcgcgccccctgagcacacgaggtgccccacgagggggagggacccacagccgtcccgcccgcaccgcggtgtccgctgcgggcacctgcagccgagccgccacccgcagtcgcagcgcgtccggcggccgaacccggtcgtcagctcgtcagcacctgctctgcttctctcccgcccgccgccgcgctgcacgcctcgagcgctccctcggccccggcggggaccggggaccccgcagccaccgccatgctgcctgtgctctacaccggcctggcggggctgctgctgctgcctctgctgctcacctgctgctgcccctacctcctccaggacgtgcggttcttcctgcaactggccaacatggcccggcaggtgcgcagctaccggcagcggcgacccgtgcgcaccatcctgcatgtcttcttggagcaagcgcgcaagaccccgcacaagcccttcctgctgtttcgcgacgagacgcttacctacgcccaggtagaccggcgcagcaaccaagtagcgcgagcgctgcatgatcacctgggcctgcggcagggggattgcgtggccctcttcatgggcaatgagccggcctacgtgtggctctggctgggactgctcaaactgggctgtcccatggcgtgcctcaactacaacatccgtgccaagtctctgctacactgctttcagtgctgcggggcgaaggtgctgctggcctccccagagctacacgaagctgtcgaggaggttcttccaaccctgaaaaaggagggcgtgtccgtcttctacgtaagcagaacttctaacactaatggcgtggacacagtactggacaaagtagacggggtgtcggcggaccccatcccggagtcgtggaggtctgaagtcacgttcaccacacccgcagtctacatatatacttcgggcaccacaggtcttccaaaggctgcaaccattaatcaccatcgcctctggtatgggaccagccttgccctgaggtccggaattaaggctcatgacgtcatctacaccaccatgcccctgtaccacagcgcggcgctcatgattggcctccacggatgcattgtggttggggctacatttgctttgcggagcaaattttcagccagccagttttgggacgactgcaggaaatacaacgccactgtcattcagtacatcggtgaactgcttcggtacctctgcaacacgccccagaaaccaaatgaccgggaccacaaagtgaaaatagcactaggaaatggcttacgaggagatgtgtggagagagttcatcaagagatttggggacattcacatttatgagttctacgcttccactgaaggcaacattggatttatgaactatccaagaaaaatcggagctgttggaagagaaaattacctacaaaaaaaagttgtaaggcacgagctgatcaagtatgacgtggagaaggatgagcctgtccgtgatgcaaatggatattgcatcaaagtccccaaaggagaggttggactcttgatttgcaaaatcacagagctcacaccattttttggctatgctggaggaaagacccagacagagaagaaaaagctcagagatgtttttaagaaaggagacgtctacttcaacagtggcgatctcctgatgatcgaccgtgaaaatttcatctattttcacgacagagttggagacaccttccggtggaaaggagagaatgtagctaccacggaagtcgctgacattgtgggactggtagattttgttgaagaagtgaatgtttacggtgtgcccgtgccaggtcatgaaggtcgcatcgggatggcctcgatcaagatgaaagaaaactacgagttcaatggaaagaaactctttcagcacatctcggagtacctgcccagttactcgaggcctcggttcctgagaatacaagataccattgagatcaccgggacttttaaacaccgcaaagtgaccctgatggaagagggctttaacccctcagtcatcaaagataccttgtatttcatggatgacacagaaaaaacatacgtgcccatgactgaggacatttataatgccataattgataagactctgaagctctgaatgttgcctggctcctaacacttccagaaagaaacacaataggcctagcatagccccttcacatgtgtaatccaactttaacttgattaaaggttataggtgtgatttttcctaggaaattattcatttaaaggacaattgtttgtttgtttgtttgttttttattaattacaccagaacgtttgcaagtaaaaagatttaaagtcacttatttttcaatgtgcacctgccatttgtccttgcaaacttagcttcttggagagagggccttatttttttaaagacataataaactatgtaaacact

SEQ ID NO: 311 - DNA, 4918 bp, Homo sapiens
tgcactttaacatctgctttcccagaggaaaaagtaaaggagaaacagtacaatcatagaagagtcttcgtaacagaagcgcgaggagagcattatggacaagttctgcaactctactttttgggatctctcattactggaaagtccagaggctgacctgcctctttgttttgagcaaactgttctggtgtggattcccttgggctttctttggctcctggctccttggcaactttacagcgtgtacagatccaggaccaagagatcttctataaccaaattctaccttgccaagcaggtgttcgtcgtgtttcttcttattttagcagccatagacctgtctcttgcgctcacagaagatactggacaagccacagttcctcctgtcagatatacgaatccaatcctctacctgtgcacatggctcctggttttggcagtccagcacagcaggcaatggtgtgtacgaaagaactcttggttcctgtctctgttctggatcctctcggtcttatgcggcgtattccagtttcagactctgatacgagcactcctgaaggacagcaagtccaacatggcctactcctacctgttcttcgtctcctacggtttccagattgtcctcctgattcttacagccttttcaggaccaagtgactcaacacaaactccatcagtcacggcttcctttctgagtagcattacatttagttggtatgacaggactgttctgaaaggttacaagcatccactgacactagaagatgtctgggatatcgatgaagggtttaaaacaaggtcagtcaccagcaagtttgaggcggccatgacaaaggacctgcagaaagccaggcaggcttttcagaggcggctgcagaagtcccagcggaaacctgaggccacactacacggactgaacaagaagcagagtcagagccaagacgttctcgtcctggaagaagcgaaaaagaagtctgagaagaccaccaaagactatcccaaatcgtggttgatcaagtctctcttcaaaaccttccacgtagtgatcctgaaatcatttatactgaaattaatacatgaccttttggtgtttctgaatcctcagctgctgaagttgctgatcggtttcgtgaagagctctaactcatacgtgtggtttggctatatctgtgcaatcctaatgtttgctgtgactctcatccaatctttctgccttcagtcttactttcaacattgttttgtgttgggaatgtgcgtacggacaaccgtcatgtcttcgatatataagaaggcattgaccctatctaacttggctaggaagcagtacaccattggagagacggtgaacttgatgtctgtagattcccagaagctaatggatgcgaccaactacatgcagttggtgtggtcaagtgttatacagattactttgtccatcttcttcctgtggagagagttgggaccgtccatcttagcaggtgttggggttatggttctcctaatcccagttaatggagttctggctaccaagatcagaaatattcaggtccaaaatatgaagaataaagacaaacgtttaaaaatcatgaatgagattctcagtggaatcaagatcctgaaatactttgcctgggaaccttcatttcaagagcaagtccagggcattcggaagaaagaactcaagaacttgctgcggttcggccagctgcagagtctgctgatcttcattttacagataactccaatcctggtgtctgtggtcacattttctgtctatgtcctggtggatagcgccaatgttttgaatgcggagaaggcatttacctccatcaccctcttcaatatcctacgcttccctctgtccatgcttcccatggtgacctcatcgatcctccaggccagtgtttctgtggaccggctggagaggtatttgggaggagacgatttagacacatctgccattcgccgcgtcagcaattttgataaagctgtgaagttttcagaggcctcttttacttgggacccggacttggaagccacaatccaagatgtgaacctggacataaagccaggccaactggtggctgtggtgggcactgtaggctctgggaaatcctctttggtatcagccatgctgggagaaatggaaaacgttcacgggcacatcaccatccagggatccacagcctatgtccctcagcagtcctggattcagaatggaaccatcaaagacaacatcctgtttgggtccgaatacaatgaaaagaagtaccagcaagttctcaaagcatgcgctctcctcccagacttggaaatattgcctggaggagacatggctgagatcggagagaaggggataaatctcagtggtggtcagaagcagcgagtcagcctggccagagctgcctatcaagatgctgacatctatattctggacgatcccctgtcggctgtggatgctcatgtgggaaaacacattttcaacaaggttgtgggccccaacggcctgttggctggcaagacgagaatctttgttactcatggtattcacttccttccccaagtggatgagattgtagttctggggaaaggcaccatcttagagaaaggatcctatcgtgacctgttggacaagaagggagtgtttgctaggaactggaagaccttcatgaagcattcagggcctgaaggagaggccacagtcaataatgacagtgaggcggaagacgacgatgatgggctgattcccaccatggaggaaatccctgaggatgcagcttccttggccatgagaagagaaaatagtcttcgccgtacactgagccgcagctctaggtccagcagccgacgtgggaagtccctcaaaaactccttgaagattaaaaatgtgaatgtcttgaaggagaaggaaaaagaagtggaaggacaaaaactaattaagaaagaatttgtggaaaccgggaaggtcaagttctccatctacctgaagtatctacaggcagtagggtggtggtccatacttttcatcatccttttctacggattgaataatgttgcttttatcggctctaacctctggctgagtgcttggaccagtgactctgacaacttgaatgggaccaacaattcgtcttctcatagggacatgagaattggggtctttggagctctgggattagcacaaggtatatgtttgcttatttcaactctgtggagcatatatgcttgcagaaatgcatcaaaagctttgcacgggcagctgttaaccaacatcctccgggcacccatgaggttttttgacacaactcccacaggccggattgtgaacagattttctggtgatatttctactgtggacgacttgctcccccagacacttcgaagctggatgatgtgtttctttggcatcgctggcactcttgtcatgatctgcatggccaccccagtcttcgctatcatcatcattcctctcagcattctttatatttcggtgcaggttttttatgtggctacttcccgccagctgagacggttggattctgtcaccaaatctccgatctattctcacttcagtgagactgtcacaggtttgcccattatccgtgcctttgagcaccagcagcgatttctagcttggaatgagaagcagattgacatcaaccagaaatgtgtcttttcctggattacctccaacaggtggcttgcaattcggctggagctggttggaaacttggtcgtcttctgttccgccttgctgctggttatttatagaaaaaccttaaccggggacgttgtgggctttgttctgtccaacgccctcaatatcacacaaaccttgaactggctagtgaggatgacgtcagaagcagagaccaacattgtggcagttgagcgaataagtgaatacataaatgtagagaatgaggcgccctgggtgactgacaagaggcctccggcagactggcccagacatggtgagatccagtttaacaactatcaagtgcggtatcggccggagctggatctggtactgaaagggatcacttgtaacatcaagagcggagagaaggtcggcgtagtgggcaggactggggctgggaaatcatccctcacaaactgcctcttcagaatcttagagtctgcggggggccagatcatcattgatgggatagatgttgcctccattggactgcacgaccttcgagagaggctgaccatcattccccaggaccccattttgttctcggggagtctgaggatgaatctcgaccctttcaacaaatattcagatgaggaggtttggagggccctggagttggctcacctcagatcctttgtgtctggcctacagcttgggttgttatccgaagtgacagagggtggtgacaacctgagcatagggcagaggcagctcctatgcctgggcagggctgtgcttcgaaaatccaaaatcctggtcctggatgaagccacggctgcagtggatctcgagacggatagcctcattcagacgaccatccgaaaggagttctcccagtgcacggtcatcaccatcgctcacaggctgcacaccatcatggacagtgacaagataatggtcctagacaacgggaagattgtcgagtatggcagtcctgaagaactgctgtccaacagaggttccttctatctgatggccaaggaagccggcattgaaaatgtgaatcacacagagctctagcagctggttccgtggctggcggactataagaacagtttctattatttgctttggtttctgtgactgtgctctaggtgcaaagacacatattttgttcccgttgctcaggctggcctcaaactctaaggctccagcaatctctggtctcagccagagacctgtaaaaatagacacttcaaagattatcatgaataaata

SEQ ID NO: 312 - DNA, 1287 bp, Homo sapiens
atgtccgcctggagctttcgccttcgccgccggtaccgctacctgttctgaacggatctccggccgactcgtccctgcgtctcatggccgctagcagatccctggtgcccgacaggctgcgcctaccactctgcttcttgggtgtctttgtctgctacttctactatgggatcctgcaggagaagataacaagaggaaagtatggagaaggacccaaacaggagacattcacctttgccttaactttggttttcatccagtgtgtgatcaatgctatgtttgccaagatcttgatccagttttttgacactgccagggtggatcgcactcggacctggctctatgctgcctgctctgtctcctatgtgggcgccatggtctccagcaactcagcactacagtttgtcaactatccaactcaggtccttggtaaatcctgcaagccaatcccagttatgctcctcggagtgaccctcttgaagaagaagtacccattggccaagtacctgtgtgtgttgctaattgtggctggcgtggctcttttcatgtataagcccaagaaggtggttgggatagaagagcacacggtcggctttggagagctccttctgctcttgtctctgaccctggatggactgacaggtgtttcccaggaccatatgcgggctcattaccaaacaggttccaatcacatgatgttgaacatcaacctttggtccacggtcttgctcggtgctgggatcctgtttactggggagctctgggagttcttgagtttcgccgagaggtacccgaccatcatctataacatcctgctctttggcttgaccagtgccttgggtcagagctttatcttcatgacagtcgtgtacttcggccccctgacctgctccatcatcaccacgactcggaagttcttcaccatcttggcttctgtgatcctctttgccaatcccatcagctccatgcagtgggtgggcaccgtgctggttttcctgggtctgggtcttgatgccaagtttgggaaaggaacaaagaagacctcccactaggaaaagagaggcttcctccactccagaaacacttaaattattatctccaacagtgacatcttgggaaaatggactcagtcacgataagggactgggttccaatctttttataaaaaaaaaaaaaaaaatcaaagggagcaagatggaatattctaaacaaagcacttgggtttaacaagacgcattgctaatttctggttttgtacagaccagcacaaataaagagaagaaaggc

SEQ ID NO: 313 - DNA, 1287 bp, Homo sapiens; identical to SEQ ID NO: 312

SEQ ID NO: 314 - DNA, 4269 bp, Homo sapiens
tctcggccgcggtgtttccgtttctctccctggttgtcgcctgctctgctcttctcatccttctcgctctgctgctctgcggagtgacgaggctgaatcttctccccacccagttcgcgcttttcttctttttctcgcgccgctccatttctccagtccggctgccgccgccactgctgctcagctggtgtcggtgccgcgcgtttcccccacgtcgtccccgcagcctatggcccaggccgccttgggtatttctgctcaaggtaaccacatccctctttaaaaattccgccgaaaaagagaagacgctttacccgactctttgggccgttatctcacggcgaactttctgaccgagtatacaactacccagaaggcctaggagaagtgctgtatagagagcagttcgattttaacgctgagccaccttgggaacctagctgatgataggggggttccatctcctaacttgtccatggaggtcttcacttcagaaacccaagactcacattcatccagcttggtgtcaagtgggctgttgctgccaggattatcttgtgattatatgaaagatgtatcagtttcttctgaagtgcagtcaactgtagaagcctttgtagcaggtgtgtaacaagtttgttgcatattctaaggacccagacataggcttggtggcccgtctcttgtttttcctggtttatgactttcggctttgtggaatacggctgagatgaaaggatttattgacgatgcaaactactccgttggcctgttggatgaaggaacaaaccttggaaatgttattgataactatgtttatgaacataccctgacaggaaaaaatgcattttttgtgggggatcttgggaagatcgtgaagaagcacagtcagtggcagaacgtggtggctcagataaagccattttacatggtgaagtgcaactccactccagccgtactggagatcttggcagctcttggaactggatttgcttgttccaccaaaaatgaaatggctttagtgcaagaattaggcgtatctccagaaaacatcatttatacaagtccttgtaagcaagcatctcagataaagtacgcagcaaaagttggagtaaatattatgacatgtgacaatgaagttgaattaaagaaaattgcgaggaatcacccaaatgccaaggtcttactacatattgcaacagaagataatattggaggtgaagatggtaatatgaagtttggcactacactgaagaactgtaggcatcttttggaatgtgccaaggaacttgatgtccaaataattggggttaaatttcatatttcaagtgcttgcaaagaatatcaagtctatgtccatgccctgtctgatgctcgatgtgtgtttgacatggctggggagtttggctttacaatgaacatgttagacatcggtggaggcttcacaggaactgaaattcagttggaagaggttaatcatgttatcagtcctctgttggatatttacttccctgaaggatctggcattcagatcatttccgaacctggaagctactatgtatcttctgcatttacgcttgcagtcaatattattgctaagaaagttgttgaaaatgataaattatcctctggagtagaaaaaaatgggagtgacgagccagccttcgtgtactacatgaatgacggtgtttatggttcttttgcaagtaagctttctgaggacttaaatactgttccagaggttcacaagaaatacaaggaagatgagcctctgtttacaagcagcctttggggtccatcctgtgacgagcttgatcaaattgtggaaagttgtcttcttcctgagctgagcgtgggagattggcttatctttgataacatgggagcagattctttgcacggaccgtctgcttttagtgacactcagaggccagctatttatttcatgatgtcactcagtgattggtatgagatgcaagatgctggaattacttcagatgcaatgatgaaaaacttcttctttgcaccctcttgcattcagctgagccaagaagacaacttctccactgaagcttaaacaggcattaacgcttctttagatctgaagtcgcaggttaagcttgtctggtctacattccagtgtggggaaaaattcaatcaatctttattctgttaattttcttggaaacaaattcatagtaatagctgtttgggaccagacaaaatcagctttcatctataattcattgggggtaataggggatttatttagataatgtatccagatttaaacataccagtttgacccaccccttaagcgtttaaaataaaatatgcaacaaaatggatgacttagtggagatggaagcccattaattgggttccccatcaaatcgtttacatacaagtacacagtttttataataaggattcctgttaaaagtcttgtaaagttgatgtctttcacccagatctatcacatgtgagtggaagaccagtgtgacttcattagatacgtttagtgtatttagagtgtgtaaatttgtgctttggactgtagtttaataaatgtaaaattgcatcatagtatttgttgtatttgacctaatgtaaccttgtatgattgcaataaaactttgtgtagattttaccattttttcaggctaaaaatttgggaatggggctagctagcaaaggtagttttgaactagttgtgtgtatggtctgttttgagagttttctttatagtccatttgtttggtttggctcaatatactttttagttatttaattagtaatttaagtaaaaagtgtttggtaatcattgtgaagttcagattcattatggagagtcgatgtgcagtaagcatgatgtttaacaattttaacaccagaaaatgttaatcttgcataaaccaattgtaataataataggtgtttctgtatagataggatgcatagagtaccttagtaaatctttgaatcacaaatcttttggctgatagaaaagattttattaaacactgaaaacttggtcggggatggggagagagactgcagaagactgcagaaccctaaccttaaagaagggctatgtctatttccagcatcctgatgccccttcgcacagacatttaaatcgagagggctttggggtggtgaagcacactcttcaatttctcacttgtaatggtatcaaattgcaatttttttgttgttgctgatcttggtttgaacctagtcccttagtttcttgttaattcccatttgttcaagcttagtaattcttccttccgtactaaagcttggtggggggtggggggaggagttagcttcactaacctgacactgttgccaggaattttggctttgttcactgctagtgtgttagtcctaagtctcagaatcacagaagtaatgagacaacttacaggggtcacttttcctaccttactctatgttcacaagtggaattcctgacctccaagaggaaatgtgacttcactttggtgccaatggacaggaaattctacctgtgctacataggagaagtgtgggatacacttgaatagctggattttacaccttgatttcaaggtggaaagaaattgatcatgaatctctaatttcaaatcaaaccagtaggtgcttaatatttttgatttgaatattgcccacttgaatatcatgggttctattaattataagaacaactaaggaccccagtccactgtcatctagttgcccttggacttttttccaaggtatactatggggtttatgcaaaatttgaagctaccatatgcattgttgtggtccaggaatgccaaaacttaaagcgtggtacaacctgagtccttggcctgactgtacaggcgtggtctctgtggcatcagttttgccttctgcataggagaaaggttgtatgtaacacagcccggaattgctatctcacatgtgaatgataggtaaacataagaatgtctgtattgtttttgaagactgtttgccataaatctaaagtcaaacctatgtatttcaatttggtatgcttaagaataattaatgtaaaatctttttatatgatattgtaatctcagttcaaatttaattgcaaatataaaacccaaatgatttctatatatagtaaattgaactgtcaaggtaacttgtgtgtgattctgaatacacagatacaatgtttttattcctcatgctttactttgatggcttctatcatgaaatagatgtgaaattttatgaaaaaaa

SEQ ID NO: 315 - DNA, 3657 bp, Homo sapiens; identical to SEQ ID NO: 143

SEQ ID NO: 316 - DNA, 1174 bp, Homo sapiens
ccgcagccttctttgacgatcaccgaaccgtagttgaggccgtgttcctgtgtccgctgctgtgtctggttgtaacctcgccggagctatgtttcgcaaccagtatgacaacgatgtcactgtttggagccctcagggcaggattcatcaaatcgaatatgcaatggaagctgtaaagcaaggctcagcgacagtcggcctgaagtcgaagacacatgcagtgctggtcgcgctgaagagagcacagtcagagcttgccgctcaccagaagaaaattctccacgttgacaaccatattggtatctcaattgcgggtctaactgctgatgccagactgttatgtaactttatgcgccaggagtgtttggattccagatttgtatttgacagaccacttcccgtatctcgccttgtgtctctaattggaagcaagacccagataccaacacagcgatatggccggagaccgtatggtgttgggctgctcattgctggttatgatgacatgggccctcacgttttccaaacctgcccatctgctaactattttgactgcagagctatgtccatcggagcccgttcccagtcagctcgcacttacctggagagacacatgtctgaatttatgcagtgcaatttggatgaactggttaagcatggtcttcgcgccttaagagaaacactccctgcagaacaggacctgaccacaaagaatgtttccattgggattgttggtaaagacttggaatttactatctatgatgatgatgatgtgtctccattcctggatggtcttgaagaaagaccacagagaaaagcacagccttcacaggctgctgatgaacctgcagaaaaagctgatgaaccaatggaacattaagtgataaaggttatgaggacatgaggatgcaggggcatacactggtgacaataatctgtattttaaaccaacagctgtaatgtattgggtggtatgttttagaaatcagtccaactgtgagttttctctaagcagcttcacagaaaccatataatggggtgcattttctttgaaagggtctacataatcattttctaggacgtataggtatctatatcaatgtttttatatgaagaaaataagtgtctttgcagttttaaagacaactgtgaaataaaattgtttcaccacctg

SEQ ID NO: 317 - DNA, 1850 bp, Homo sapiens
gaattccggttctagttgttgttttctctgccatctgctctccgggcgccgtcaaccatgggtccgtggacccactccttgcgcgccgccctgctgctggtgcttttgggagtctgcaccgtgagctccgacactcctgccaactgcacttaccctgacctgctgggtacctgggttttccaggtgggccctagacatccccgaagtcacattaactgctcggtaatggaaccaacagaagaaaaggtagtgatacacctgaagaagttggatactgcctatgatgaagtgggcaattctgggtatttcaccctcatttacaaccaaggctttgagattgtgttgaatgactacaagtggtttgcgtttttcaagtatgaagtcaaaggcagcagagccatcagttactgccatgagaccatgacagggtgggtccatgatgtcctgggccggaactgggcttgctttgttggcaagaagatggcaaatcactctgagaaggtttatgtgaatgtggcacaccttggaggtctccaggaaaaatattctgaaaggctctacagtcacaaccacaactttgtgaaggccatcaattctgttcagaagtcttggactgcaaccacctatgaagaatatgagaaactgagcatacgagatttgataaggagaagtggccacagcggaaggatcctaaggcccaaacctgccccgataactgatgaaatacagcaacaaattttaagtttgccagaatcttgggactggagaaacgtccgtggcatcaattttgttagccctgttcgaaaccaagaatcttgtggaagctgctactcatttgcctctctgggtatgctagaagcaagaattcgtatattaaccaacaattctcagaccccaatcctgagtcctcaggaggttgtatcttgtagcccgtatgcccaaggttgtgatggtggattcccatacctcattgcaggaaagtatgcccaagattttggggtggtggaagaaaactgctttccctacacagccacagatgctccatgcaaaccaaaggaaaactgcctccgttactattcttctgagtactactatgtgggtggtttctatggtggctgcaatgaagccctgatgaagcttgagctggtcaaacacggacccatggcagttgcctttgaagtccacgatgacttcctgcactaccacagtgggatctaccaccacactggactgagcgaccctttcaacccctttgagctgaccaatcatgctgttctgcttgtgggctatggaaaagatccagtcactgggttagactactggattgtcaagaacagctggggctctcaatggggtgagagtggctacttccggatccgcagaggaactgatgaatgtgcaattgagagtatagccatggcagccataccgattcctaaattgtaggacctagctcccagtgtcccatacagctttttattattcacagggtgatttagtcacaggctggagacttttacaaagcaatatcagaagcttaccactaggtacccttaaagaattttgcccttaagtttaaaacaatccttgatttttttcttttaatatcctccctatcaatcaccgaactacttttctttttaaagtacttggttaagtaatacttttctgaggattggttagatattgtcaaatatttttgctggtcacctaaaatgcagccagatgtttcattgttaaaaatctatataaaagtgcaagctgccttttttaaattacataaatcccatgaatacatggccaaaatagttattttttaaagactttaaaataaatgattaatcgatgct

SEQ ID NO: 318 - DNA, 1850 bp, Homo sapiens; identical to SEQ ID NO: 317

SEQ ID NO: 319 - DNA, 2615 bp, Homo sapiens
catcctccctggggtcctagagaacactcttcagttcagtccttcctcacagccaaagcagccacctagatcatgccttctgtgtatggattcccagccttcacatcagccacagagctgctcttggccgtcaccacattctgccttggattctgggtggttagagtcacaagaacctgggttcccaaaggtctgaagagtccacccggaccctggggcttgcccttcatggggcacgtgctgaccctggggaagaacccacacctgtcactgacaaaactgagtcagcagtatggggacgtgctgcagatccgtattggctccacacccgtggtggtgctgagcggcctgaacaccatcaagcaggccctggtgaaacagggggatgacttcaaaggccggccagacctctacagcttcacacttatcgctaatggccagagcatgactttcaacccagactctggaccgctgtgggctgcccgccggcgcctggcccagaatgcgctgaagagtttctccatagcctcagacccaacactggcatcctcttgctacttggaagagcacgtgagcaaagaggctgaatacttaatcagcaagttccagaagctgatggcagaggttggccacttcgaccctttcaagtatttggtggtgtcagtggccaatgtcatctgtgccatatgctttggcagacgttatgaccacgatgaccaagagctgctcagcatagtcaatctaagcaatgagtttggggaggttactggttctggatacccagctgacttcattcctatcctccgttacctccctaactcttccctggatgccttcaaggacttgaataagaagttctacagtttcatgaagaagctaatcaaagagcactacaggacatttgagaagggccacatccgggacatcacagacagcctcattgagcattgtcaggacaggaggctggacgagaatgccaatgtccagctctcagatgataaggtcattacgattgtttttgacctctttggagctgggtttgacacaatcacaactgctatctcttggagcctcatgtacctggtaaccaaccctaggatacagagaaagatccaggaggagttagacacagtgattggcagggatcggcagccccggctttctgacagacctcagctgccctatctggaggccttcatcctggagaccttccgacattcatcctttgtcccattcaccatcccccacagcaccataagagatacaagtctgaatggcttctatatccccaagggacactgtgtctttgtgaaccagtggcaggttaaccatgaccaggaactatggggtgatccaaacgagttccggcctgaaaggtttcttacctccagtggcactctggacaaacacctgagtgagaaggtcattctctttggtttgggcaagcgaaagtgcattggggagaccattggccgactggaggtctttctcttcctggccatcctgctgcagcaaatggaatttaatgtgtcaccaggcgagaaggtggatatgactcctgcctatgggctgactttaaaacatgcccgctgtgagcacttccaagtgcagatgcggtcttctggtcctcagcatctccaggcttagactgtcctggatgctcaccagactaggtggctgttcctaggattcaacttcagtcagaaacacagaccctggggcattgtgcctgcctcctactttggacttgtttctctatatgctgaacacagacactgggcacagcagagacccacaggaacctcagatccttctcaagttcagcatcaactaggagacctaaaagggttatgagatacctgggcctcagaaaacccctgaagagctctctggtcctccagtggctggctggtttgaaaaatacttacaacaggtcatgctaggatctggctggttactttgacaaccgggagtagcccagaatggagggagaagagaactcaaaatactggcacggaggtgctcttgccatctgctgaggctcaactgtcttccaacatgggtttatgacactacatgtgggggtgtagcaccttcatttaccctacatagaaataaacaaggtctccttgtccttgcaaagcccatgttcctgtttaggaagggctgagagttgtgtgtagaaagacctaagaacatagggacagactttctgggcagtaagaccaggtttagagtaaaggaatgccttttgagacagtattgtgtagtccaagttgcctctgaacttgctaccaagggtggccttgaactccttaattcttttttctgcttttaccaccctaccaagtgctagggtacagtcatgaaccgctacaccagctcttggtctcttgtctttactgtataaaacgtttctttctttcttttttttttaaagaaaatgtttgtgcataagagttttttattgtggcctgtattttgcttatgcatttgtattagtcgtacttcaatagatttagataattcgcttagtgtaatagagaaaaatctaactcaagtatccagaaatatataggaaaaacgtacctgagctaaataaaaatattacctgg

SEQ ID NO: 320 - DNA, 3513 bp, Homo sapiens
gtgcagccaccctcgcctgcctcgctcttccttccttcgctcgcaccatggctgatcagctgactgaagaacagattgctgaattcaaggaagctttctccctatttgataaagatggggacggcaccatcacaacaaaggagctggggactgtcatgcggtcactgggtcagaacccaacagaggctgaactgcaggatatgatcaacgaggtggatgccgacgggaatggcaccattgacttcccagagttcttgactatgatggctagaaaaatgaaagacacagatagcgaagaagaaatccgtgaggcattccgagtctttgacaaggatggcaatggctacatcagtgcggcagaactgcgccacgtcatgacaaacctcggggaaaagctaacagatgaagaagtagacgaaatgatcagagaagcagatattgatggagacggacaggtcaactatgaagaattcgtacagatgatgactgcaaaatgaagacctactttcaactactttccccctctagaagaatcaaattgaaatcttttacttacctcttacaaaaaaaaaaaagaaaaaagaaaaaagttcatttcttcattctgtttgtatctagcaaaactgaatgtcaaaagtaccttctgtccacacacaaaatctgcatgtattggttggtggtcctgccccctaaagatcaagccccctacatgagttttacagtataaatactcgtactaccttataaggaagcacttagtggactccttcaagttccatttgctaatgattaacacactgtctgggctggccagtttctcatgcatgcagcttggtgattgagcacagtcaggcctttgtattaaaactgaaaaatggaaaaaacaaattcaaactctcagatggcttctagttcaatctgttcagataaatgtcagcagccagtttaccgcaaacaaacatttaaaattggtttacctcaggatgatgtgcaggaaacgggtgaaggctaaactttgagacacagccctagatgtaggacagtcctcttcaagtgccccaatcccatggtgacagtgacaccctggtggcgagcccgagtgtgatggttcaccgctgtgcacattgcattggagtgaagtgaacaaggctgtcaccaaatcacacacgttttaataagaaatgtttactaagggagcatctttggactctctgttttaaaaccttgtgaaccatgactcggagccagcagagtaggctgtgtctgtggacttgagcacaccatcaacattgctgttcaggaaattataatttacgtccattccaagttgtaaatgctagtcttttattttttttttccaataaaaagaccattaacttaaaagtggtgttaaatggtttgtaaagctgagcttggaagggggacaaggccgttggaggggaggtcagcggacatagaaacacccaacgtccagtacaagctggatttcccgcccaggttctctagcatcaacccctgaaaccagacagattctttgtcatctacgaccatgtaagtctagttattcaaatctgcgcgcatgcgcaaatcatggtgaattgatacttggagtagagccctagtgaaggaaggcctcaagcattcagtaaggatgtcttggctgtgctgctgctgacctgttgaagtacatgaggccatctgtgcaggagacatgatttagtgtgtgtgtaatcctatactcactgtgtatggtgaagcaggccagtcaaagacactacctttgattcagtttaatttatggttatacttaactttagccttttttattatttaagttcactgctttttctccccctaagtagagttaatgcttaacactgtcttgaaagcaaaacaatatcccagaatgaattttgtgtcttaattacgaacctgtaaccaaaacgtacatgtgctggtactggtcccttagcccaaggcactgggctatttaaaaagtcccccttaagaagtgtgttgcatttaaaacaagggccttgtacatttttcagggtgttaactggctgtatctgattaataaggagtgttggcttccaaattcgggggtggcagggagctggcaggcttgtagcaaggcaatgagaagcccttggcaaccacacgggtgcactcggggtaacctacagacccctggttgctccttctcctgctccctgtctttctggcgttttgtagctccttagaattttttttctttctgccaggaggataggtcagagcagtagagaggaagacattgcctgagcgcttctgctcatctttggactgggtggttggcagacaggtcgatgggtggtaaattgacttcagtatcggactcagtaggtattcccttttggtagagaggactgagggctccaggtgtgaagtgaatggccgtggatatgttgtgtaagaggattaagtcgcccagtcgatgacccagtctcaggcttgtggtctgttacctcttggtagtttcaaagggggtcggaggtggctttttaaaaacaatttaccccctatctttaaccatttaccaagtctgtagaagctgggtagacaatattttagcagctccgtagcctgtcctaaaaggttaccttctaaacaggattcttgtgtggccagggatcctgcatgggaactggaaacccctaacccccggggggtgggaagcaggagtttggaactgtaggaggcagagtccccccacctcctcagccttctggcatccaggggcacaagcagcccagggcttggtgttggcagtctgagttcgtgaggtagaaagagtggggtgtcaaggcagtacccctgaagttggatagtactttcctgtaaactgtccctcacttataactactctataaatatatgcatatatttatataaatatatatatataagtgactggttagctggcatcctgctttagcctgagacttgccctaagaaactgctgagcccttggtaaacgtctacacagtaagtttttctgtctgttggggggagctgttgaacaaggcagacatcttgatagttcagatgggctttaatgtactgttgccagggaaggctttttctggttttttgacaaatttttagcacacttcaattggtgtctcgagcaactttaacacattgaagatgaggtattgtacatatttttatattctctttataagtgcatgtctccaacttgtaaccaatattgtacggaatggctgtccagtaggcctagtgtttctgtcacacgagagggatagcatgtaccattcacccctcagcatcctgggagcttcttcttgaatgaagactgtaaatttggtcaagtcaactcttagttcggtttccttaccatttgaatgattgactgtgtgtcctgcgtgtatttctcttttggcagcgaccagagttacactgatgtgtctcaaccgacccactcggctggcaaccacctatttattttct

SEQ ID NO: 321 - DNA, 1016 bp, Homo sapiens
gacttcgaacctcattcggtgcagaactcctgtcccggtgacagccacaggtcacggccgccggctaagccgagccgcagcgcttggtagcaccttagggtgtctcgggagcaatcgcgccgggtccatggagaagccgcggggtgtaaggtgcaccaatgggttccccgagcgggagctgccgcggcccggggccagccgacctgccgagaagtcccggccgcccgaggccaagggcgcacagccagccgacgcctggaaggcagggcggccccgcagcgaggaggataacgagctgaacctccccaacctggcggccgcttactcgtccatcctgcgctcgctgggcgaggacccccagcggcaggggctgctcaagacgccctggagggcggccaccgccatgcagttcttcaccaagggataccaggagaccatctcagatgtcctgaacgatgctatatttgatgaggaccatgacgagatggtgattgtgaaggacattgacatgttttccatgtgtgagcatcacctggtcccatttgtgggaagggtccatattggttatcttcctaacaagcaagtccttggtctcagcaaacttgccaggattgtggaaatctacagtagaagactacaagttcaagaacgccttaccaaacagattgcagtggccatcacagaagccttgcagcctgctggcgtcggggtagtgattgaagcaacacacatgtgtatggtcatgcgaggtgtgcagaaaatgaacagcaagactgtcactagcaccatgctaggcgtgttccgggaagacccaaagactcgggaggagttcctcacactcatcaggagctgaacttccgtgtgcgagccccggtttgcagacccccgctgaggccagcgttatctgtctcgattgtacattccagttccagttggtatacttgtcaactttatttctcaccatgaattgtatttaataattatttatagagatgtcaaataaaggtgatcaactt

SEQ ID NO: 322 - DNA, 355 bp, Homo sapiens
  misc_feature (61)..(61): n is a, c, g, or t
  misc_feature (75)..(75): n is a, c, g, or t
  misc_feature (221)..(221): n is a, c, g, or t
  misc_feature (243)..(243): n is a, c, g, or t
gacgtaaaatagaaacagactttatttctctggaagaagcagatatccatggctgggacanagctttggcaacanaggcgatgggaacacatcaaatggacacaggggaggaacaggcatcaaacaggacaagtactggtgccgctggggtctccctccacacccggggcctggggccctggtccctgccagagaagatcctggcgcctcttctgtttctnagccacttcaggctgtttacanttacaagatctaagaccagccaagcccgagttcacagtgaagccacaggtcacattctgtccaacactccacattcctacaggggttccctgggaaaagggggcctggtcct

SEQ ID NO: 323 - DNA, 438 bp, Homo sapiens
  misc_feature (80)..(80): n is a, c, g, or t
  misc_feature (195)..(195): n is a, c, g, or t
  misc_feature (279)..(281): n is a, c, g, or t
ggcttcaatggattttattagccttctttcatgtactgactgggtataggaggccttccagaggaagaggcctgcaagtnagaggctcaggagaagccaaatcactgacacccagagctggttagggtgggatggacaagatctgagcgattcctcttctggaggagggaacgaacagtgctgctgaggcatgtnacccacccagccagacactcttcacagaacagttctggagggtgtggtgaaggatgtcctgctccatgcagggatgggtgtcannngaggaagggaggagtttatcagaaggcaagaggaagtaacaaactgagaggagcggaggaggaggaaagcagttaagctgccttcgtctgcaagcctccaggatggcacggaagatggctgcagccgcgacttctccaggatctggctgatctagtt

SEQ ID NO: 324 - DNA, 422 bp, Homo sapiens
  misc_feature (34)..(34): n is a, c, g, or t
  misc_feature (81)..(81): n is a, c, g, or t
aaagatttattcatgcagtttatgtatatgagtnctgtcttcatacacatcagaaggaatcagacctcatagatggttgtnagccactatggggttgttgggaattgaacttaggacctctggaagaactactgggtgctatcactcagacccaggtttttgggagagacagtgtcctgtgtagcctataactgattaggaatttgaatctcttctgcctccacctaccacatgctgggatgactgctaagagttgtagcttccagaaaggatgaacattaagacctttgtgcttctgtaacagaagttaaagaaccatgggaacattactttggtttcaacaggatggtgtttgttcaaggctgagagcctcaagtgagcaatttagcagagtctgtatacaaacagatttaccactgggg

SEQ ID NO: 325 - DNA, 422 bp, Homo sapiens; identical to SEQ ID NO: 324
  misc_feature (34)..(34): n is a, c, g, or t
  misc_feature (81)..(81): n is a, c, g, or t

SEQ ID NO: 326 - DNA, 419 bp, Homo sapiens
  misc_feature (78)..(78): n is a, c, g, or t
  misc_feature (85)..(85): n is a, c, g, or t
  misc_feature (158)..(158): n is a, c, g, or t
  misc_feature (236)..(236): n is a, c, g, or t
  misc_feature (295)..(295): n is a, c, g, or t
  misc_feature (341)..(341): n is a, c, g, or t
  misc_feature (369)..(369): n is a, c, g, or t
gaacatgttaccttttatttaaaagtgttactagccctgcctggggctcctatacaaaaacaacacacaacccaaatnaggctgnttcccgtctctagactcggggacagtgttggggtttagcgagtggaatgtgtgctgaaggagggcacccaggnggctcctaccccagtcctcaggatggcaccagctgtcccgttgcctttctatttaccacagaggaaggaaaggcagtnttttgagatgctcagtagaagtcgagcatggatggcttcatcaccaggctggggcagtnttggcaagacgcctcattcgccttgtgttcctgtcttgatcccggntcttcttctccatctcagcatccgtcantgtctccagcagggggcaccactggtcagcatctccagtatttcggatgg

SEQ ID NO: 327 - DNA, 684 bp, Homo sapiens
acgagtgctgacatgatcactctctgtgttcacaggaaagcgcatttgtcttggcgaaggcattgcccgaaatgaattgttcctcttcttcaccaccatcctccagaacttctctgtgtcaagccatttggctcccaaggacattgacctcacgcccatggagagtggcattgcaaaaatacctccaacgtaccagatctgcttctcagctcggtgatcgggctgaggcagccaggtgccccagttctgttgggaatggcctcatgtttctgcctctgggggacctgctgaaaaccaggctccaaggccactgctccacatcttcctattgcagttctccaaagtcccaaggcttgttcttattcctgtgaatggcactgaagaagtcaatcgactgtcttattttgacatgtgacagagatttcatgagtacacatctcatgctgagtcacttccctcttcctcctaatagcccacgtccccacttatcagccctccatggtctgtgatctgtgctaatggactctgtatatggtctcagtgctatgtctacagacttacatagtatgtatggttcaggtaaacagaatcacagagtgtgtgagcttcggtgtgttgtgcctttacttcacataatattatctaggttcctgtgttctacaggccacagtcacacacattcat

SEQ ID NO: 328 - DNA, 1617 bp, Homo sapiens; identical to SEQ ID NO: 227

SEQ ID NO: 329 - DNA, 306 bp, Homo sapiens
atgcagccccgaatgctcctcatcgtggccctcgtggctctcctggcctctgcccgagctgatgagggagagggatccttgctgctgggctctatgcagggctacatggaacaagcctccaagacggtccaggatgcactaagcagcatgcaggagtctgatatagctgtggtggccagcaggggctggatggacaatcgcttcaaatccctgaaaggctactggagcaagttcactgataagttcactggcctctgggagtctggccctgaggaccaactaacaacaccaactcttgagccgtga

SEQ ID NO: 330 - DNA, 889 bp, Homo sapiens
agactgttggagagctccgggggaggtcgccacatccttcaggatgaaagctgcagtgttggctgtggccctggtcttcctgacaggttgccaagcttgggagttctggcagcaagatgagccccagtcccaatgggacagggtgaaggatttcgccactgtgtatgtggatgcagtcaaggacagcggcagagactatgtgtcccagtttgaatcctccactttgggcaaacagctgaacctgaatctcctggacaactgggacactctgggttcaactgttggtcgcctacaggaacagctaggcccagtgactcaggagttctgggctaacctggagaaagaaacagattggctgagaaacgagatgaacaaggacctggagaatgtgaaacagaagatgcagccccacctggatgaattccaggagaagtggaacgaggaggtcgaggcctaccgccagaagctggagcctctgggcaccgagcttcacaaaaacgcgaaggagatgcaaaggcatctaaaggttgtggccgaggagtttcgagaccgcatgcgtgtgaatgcagacgcgctgcgcgcaaagtttgggctctacagcgatcagatgcgcgagaacctggcccagcgcctgaccgagatcaagaaccaccctaccctgatcgagtatcataccaaggccagcgaccacctgaagacacttggtgagaaagccaaacccgcgctggatgacctgggccagggcctgatgccggtgctggaagcctggaaggccaaaatcatgagtatgatcgatgaggccaaaaagaagctgaacgcttagtgaggcgcccgtcaccactccccacccctgaattggctttcttacaataaacgtttccaaagtggg

SEQ ID NO: 331 - DNA, 2343 bp, Homo sapiens; identical to SEQ ID NO: 296

SEQ ID NO: 332 - DNA, 1501 bp, Homo sapiens
cagggtcgtcctggcaaccagctgctcagccaatcagcgcttgacactacgatccgcccccaacttctggagccatggcggtgagaagagccctgattgtattggcccacgcagagaggacatcattcaactatgccatgaaggaggctgctgtggaggctctgaagaagaaaggatgggaggtggtcgaatctgacctctatgctatgaactttaaccccctcatttccagaaacgacatcacaggggagccgaaggactcggagaactttcagtaccctgttgagtcatctctggcgtataaggaaggccgcctgagcccggatattgtagctgaacagaaaaagctggaagctgcagacctggtgatatttcagttcccattgtattggtttggggtgcccgccattctgaaaggctggtttgagagagtgcttgtagcaggattcgcctacacgtatgccaccatgtatgacaagggtcctttccagaataagaagaccttgctttccatcaccaccgggggcagcggctccatgtactctctgcagggtgtccacggggacatgaacgtcattctctggccaattcagagtggcattctgcgcttctgtggcttccaggtcttagaacctcaactggtgtacagcattggccacaccccacccgatgcccgcgtgcaggtcctggaagggtggaagaagcgtctggagactgtctgggaggagtcaccactctactttgctccaagcagcttgtttgacctaaacttccaggcaggattcttactgaaaaaagaggttcaagaggagcagaaaaagaacaagtttggcctttctgtgggccatcatttgggcaagtccattccagccgacaaccagatcaaagctagaaaataaggttttccataccatgtagttagacccaggtttctttttccccagcttgcctggcttgctttcagttttcgcctttgttccacaaggataggaaaaggaggaggctcgcctcatgcgtttttggatagttctgccacggcgtgtgacagcaaaatgaacgaggtcagattaggggcctcaggtggcctgggatatgaatcagggagaggtgtagccgcgagcggggaaaatactcttctaggtcttttgtacactataagcttttttcttcgggctagcctggctaaatggcatccaatcctccacccacttgttgctattagttacctctctgtggtttagggcaggagggaattgctcaaacaatggctgagggactaacttgtttagcagttagctaaagcctgtttatgatccatcctggtttcaattactgtgcagtgactgacaagcctcgggggattgctctccagctcttctctgccttgtacatagcacacccaggtcctgggaaatgaatacaaaaacaggtctccgcctcattcttgctattctttctttgtgtgtgtgtgtgtggaaataaatggatatttcacacgtca

SEQ ID NO: 333 - DNA, 1639 bp, Homo sapiens
tccgcggccaagatctggaggccgagccgtggcctgcgccaggctgccctcttgctgttggggcgacctggggctcggggcttggctagattccaccccagcaggcagcagcaacagcagttcccatccctggatgacaagccccagttcccaggggcctctgcagagtttgtagacaagcttgagttcatccagcccaatgtcatctccggcatccccatctaccgcgtcatggaccgacagggccagatcatcaaccccagtgaagatccccacctgccccaggaggaggtcctgaagttgtacaggagcatgacgctgctcaacaccatggaccgcattctctatgagtcccagcgacagggccggatctccttctacatgaccaactatggcgaggaggggacacatgtggggagtgccgctgccctggagcgaacggacctggtgtttggccagtaccgggaggcaggtgtgctcatgtaccgggactacccgctggagctgttcatggcccagtgctacggcaacgtgagtgacccaggcaagggacgccagatgcccgttcactacggctgcaaggagcgtcacttcgtcaccatttcctctccactggctacgcagatccctcaggcggtaggggcagcctatgctgccaagcgggccaatgccaatcagatcgtgatctgttactttggcgagggggcagccagtgaaggggatgcccacgccggtttcaattttgctgccaccttggagtgtcctatcatcttcttctgccggaacaatggctatgccatctccacaccaacctctgagcagtaccgtggggatggcatagcggctcggggccctgggtatggcatcatgtcaatccgtgtggacggcaacgatgtgtttgcggtgtacaatgccactaaggaggcccgacggcgggctgtggctgagaaccagcccttcctcattgaggccatgacctacaggatcgggcaccacagcaccagtgacgacagctctgcgtaccgttcggtggatgaggtcaattactgggacaagcaggaccacccgatctcgagactgaggcagtacctgctgaaccagggttggtgggatgaggaacaggagaaggcctggcggaagcagtcacgaaagaaggtgatggaggcctttgaacaggctgagcggaagctaaagcccaacccaagcctcctcttctccgatgtgtaccaggagatgcctgcccagctgcgcaggcagcaggagtccctggctcggcacctgcagacctacggggagcactaccccctggaccactttgacaagtgaggccctaaccaccacaaggtgtcctgctctgagtggagctggggggcggcaggacgctgccccccgctgctaaccagtgctgctgacgtgctgagcagccagtgtggcacgcactgcggctcccccaggctacttcactggggcaccacatttgcagccattgctgcagctccatcactcccttcacctgttacagtgccttttaggggtggggaggaaccagggccagggcagaccctttggcagggtggccctggatttgctcagagaaatagctgattggcagagtaagtaaaccacagctctgcctttg

SEQ ID NO: 334 - DNA, 2178 bp, Homo sapiens
gaagaagggcactggtcggtttagcgtcctccgctcgagtgcccaccgccgtctcgtcgagagcccgcgcaggacccgggacactttgcagacatggagactgtcgttcgcagatgcccattcttatcccgagtccctcaggcctttctgcagaaggcagggaaatctctgctgttctatgctcaaaactgccccaagatgatggaagtcggggccaagccggctcctcggaccgtgtccacttcagcagcacagtgccagcaggtcaaagaaacccctccagccaatgagaaagagaaaactgccaaagccgcagtccagcaggctcctgacgagtcccagatggcacagactccagacggcacacagctcccgcctggacacccgtcaccctctacaagccagagctctgggagcaagtgccctttcctggcagcacagctgagccagacgggcagcagcgtcttccgcaaggccagtctggagcttcaggaggacgtgcaggaaatgcatgctgtgaggaaagaggttgctcaaagcccagtgctccccagcttggtcaatgcaaaaagggatggagaaggtccaagcccactgctgaagaacttccaggacatcatgagaaagcaaaggccagaaagagtgtctcatcttcttcaggataacttgccaaagtccgtttccacttttcaatatgatcatttctttgagaagaaaattgacgagaaaaaaaatgaccacacctaccgagtttttaaaactgtgaaccggagagcacagatcttccctatggcagatgactacacggactccctcatcaccaaaaagcaggtgtcggtctggtgcagcaacgactatctaggcatgagtcgacacccacgggtgtgtggggccgtcatagagactgtgaaacagcatggtgccggagcaggtggaactagaaatatttctggaacgagcaagttccatgtggaactggagcaggagctggctgacctccacggcaaggacgcggcgctcttgttctcttcctgcttcgtggccaacgactccactctcttcaccctggctaagatgatgccaggctgtgaaatttactctgattccgggaaccatgcctccatgatccaagggattcgcaacagtcgagtgccaaagtatatcttccgccacaatgatgtcaaccatctcagagaactgttgcagagatccgacccctcggtccccaagatcgtagcattcgaaactgtccattcaatggatggagcagtgtgccccctggaagagctgtgtgatgtggcccatgagtttggagcgatcacgtttgtggacgaggtccatgcagtagggctctatggggcttcaggtggagggatcggtgatcgggatggagtcatgccaaaaatggacatcatttctggaacactcggtaaagcgttcggctgtgttggaggatacattgccagcacgagtttgctgatcgacaccgtccggtcctacgctgcgggcttcatcttcaccacctccctgccaccaatgctgctggctggagccctggagtctgtgcggatcctgaagagcaatgagggacgtgcccttcgccgccagcaccagcgcaatgtcaagcttatgaggcagatgctaatggacgctggcctcccagtcatccactgccccagccacatcatccctgtgcgggttgccgatgctgctaaaaacacagaaatctgtgatgagttgatgaccaggcataatatctacgtccaggccattaattacccaacagtgcctcgtggggaggagctcctccggatcgcccccaccccgcaccacacaccgcagatgatgaacttcttcctagagaagctgctgctcacgtggaagcgagtcgggctggaactgaagccacattcgtcagctgaatgcaacttctgcaggaggcccttacacttcgaagtgatgagcgagagagagaaagcctatttctcaggcatgagcaagatggtgtctgcccaggcctgactgtgactcagttattcacaaaccccagaccattaccatacccaaatagtagccagaattgtctttatatgtgaagtaaattatatattaaatcttaatctatagtaaaaaaaaaaaaaaaaaaaaaaaaaaaaaaaaaaaaaaaaaaaaaaaaag

SEQ ID NO: 335 - DNA, 2178 bp, Homo sapiens; identical to SEQ ID NO: 334

SEQ ID NO: 336 - DNA, 4347 bp, Homo sapiens
atgtggaagaatagagaggctcagctgtgccttttttcagttctgcttgctttcctaccttctgcttccttactctttggaaattcgaagtatatggtgctggtcccttcccagctctacaccgagacccctgagaaaatctgcctgcatctataccatctgaatgagacagtgactgtgacagcttccttgatatctcaaaggggaacgagaaaactgttcgatgagcctgtggttgacaaggacttgttccactgtgtttccttcatccctagattgccctcttctgaagaggaggagtcactcgacatcaacattgaaggggcaaagcataaattcagcaaaaggcatgtggtgcttgtgaagaacaaagaaagtgttgtctttgtccagactgataagcccatgtacaagccaggacagtcagttaaatttcgggttgtctctatggataaaaatctataccccctgaaggagttggtgcaggatccgaaaatgaaccgaattatgcagtggcaagacgttaagactgagaatgggcttaagcaactgtccttcagcctgtcagcagagcccattcagggcccctacaagatagtggttctcaaacagtcaggagtgaaggaagagcattccttcaccgtcatggaattcgtgcttcccagatttggtgtcgatgtgaaggttccaaacgccatctctgtgtacgatgagataatcagtgtgactgcctgtgacagatatacctatgggaagcctgtcctgggacgtgtaaaggtaagactttgccatggaaatccgtcctttagctctgagacaaagtctgcatgcaaagaagagaactcccagctagacaacaatggctgcagcacacaagaagtgaacatcactgagttccaattaaaggaaaattacctcaaagtgcgccaggctttccatgtgaacgcaactgttacagaagaaggaacaggtatggagttcggtggatatggaagaattgaagtcgaaagaaccaggaacaaattcctatttctgaaagcagactcacacttcagacatgggatcccattctttgtgaaagtccgcctagtggatatcaagggagatcctatcccaaatgagcaagtcttcatcaaagcacaagaagctggctacaccaatgctactaccactgatcagcatggcttggcaaagttctccatagataccagcagcatctcaggctattccctcaatatcaaagtctaccacaaggaggaaaatttatgcatccattcctcttgcacagcagaaagacacgcagaggcacatcatacggcctatgctgtttactccctcagcaagagctacatctacctcgacacagaagctggcgtcttgccctgcaaccagatccacacagttcaggcacattttattctgaaggggcaggtcttgggagtgctgccacagattgttttccactacctggtcatggcccagggcagcatcctccagactggaaaccacactcatcaagtggagtcaggagctccagtacagggcaacttcgccttggagatccctgtggagttcagcatggttcccatggctaaaatgctcatctacaccatcttgcctgatggagaagtgattgcagactctgtaaagtttcaagttgaaaaatgtcttcgcaacaaagtgcacctgagcttcagcccatcccaaagtcttccagcctcacaaacccatatgcgggttacagcttctcctcagtccctctgtggactgagagctgtggaccaaagcgtgctgctgctgaggcctgaggctgagctctccccttccttgatatatgatctaccaggtatgcaagacagcaacttcattccacgttcccaccatccatttgaagacgaagatgactgtttgatgtaccaaccaagagacactgaagagctcacgtactcagtaccatatggacgagagaaggatgtctacagatacgtggacatgggtttaacagcattcaccaacttgaagatcaaacatcctacatattgttatgatctacctaaagagccaccacgtaaagatccaccacgtaaagatccagaacctaaagatacagttgttgagaccattaggaattattttcctgaaacttgggtctgggatttagtcacagtaagctcctcaggagtgactgaagtggaaatgacagtccctgacaccatcactgagtggaaggctggagccctctgcctgtctaatgacactggtcttggcctctcttctgtggcaactctccaagccttccagcccttctttgtggagctcacaatgccctactctgtgatccgtggagaagccttcacgctcaaggccacagtgatgaactacctccctacaagcttgcagatgacagtgcagctggaagcttctcctgatttcacagctgtcccagtgggaaatgaccaagattcttactgccttggtgccaatgggaggcacacctcatcctggttggtaactcccaaatctttagggaatgtgaatttctctgtgtctgtggaagcacaacagtccccagagccctgtggttccgaggtggccacagtgcctgaaactgggagaaaggacacagtcatcaaagtcttgatagttgagcctgaaggaatcaagaaagagcataccttcagctcacttctctgcgcatcagatgctgagctatcagaaacattgtctctgttgcttccaccaagagtagtgaaagattcagccagagcacatttctctgtgatgggtgatatcttgagttcagccataaaaaatacacaaaatcttatccaaatgccctatggctgtggggagcagaacatggtcctttttgctccaaacatctatgttctgaaatatctgaatgaaacccaacagctgacagagaatatcaagtccaaggcccttggctacctcagagctggttatcagagagagctgaactacaaacacaaggatggctcctacagtgcctttggggatcacaatggccagggtcaaggaaacacttggctcacagcctttgtgctcaaatcttttgcccaagctcgagccttcatcttcatcgacgaatcacacatcaccgatgccttcacctggctctccaagcagcagaaggacagtggctgcttcaggagctccggatcactgttcaacaatgccatgaaggggggagtcgatgatgaaatcaccctctctgcctatataaccatggcccttctggaaagttcactcccacctgttgtctccaaagccctgggctgcctagaggcatcttgggagaccatagagcaaggaagaaatggcagctttgtgtacacaaaggcactgatggcctatgctttcactcttgcgggaaaccaggagaaaagaaacgaaatcctgaaatcccttgataaggaagctataaaggaagataactccatccactgggaaagacctcagaaacccatgaaatcagagcactatctgtacacaccccaggcttcttctgttgaagtagagatgagtgcctatgttgtcttagctcgcctcactgcccacccagccccatcccctgaggacctggctttgtcaacgggcaccatcaagtggctcacaaagcagcagaattcccatggcggcttctcctccacacaggacactgtggtggcccttgatgctctgtccaaatatggagcagctactttttccaaaagccagaaaactccttcggtgaccgtccaatcttcagggtcattttcccaaaagttccaagtggacaagagtaatcgcctgttactgcagcaggtctcattaccagacattcctgggaactacaccatccgtgtgtcaggggaaggatgtgtgtatgctcagactacgctgagatacaacctgcccttggagaagcagcagcctgcgtttgctctaaaggtgaagaccgtacccctgacttgtaacaaccccaaaggccagaacagcttccagatctcactagaaatcagttacacggggagccgtccagcctccaacatggtgattgccgatgtgaagatgctctctggtttcatcccattgaaaccaacagtgaagaagcttgaaagattagagcacgtgagcagaacagaagtgaccaccaacaacgtcctgttatatttggaccaggtaaccaatcagacactgtccttctccttcatcattcaacaagacatcccagtaaagaacctgcagcctgccattgtgaaagtgtatgactactatgagacagatgaagtggcttttgctgaatatagcagcccctgcagctcagacaaacaaaatgtttga

SEQ ID NO: 337 - DNA, 1393 bp, Homo sapiens
ggggggcgtgattccgtcctgcgtgtctgttctgcggaacagtaggcagttgttttccgtccggcttctctcacactcaagtgcgcgcctccacctcatggaagactcgatggacatggacatgagccctcttaggcctcagaactaccttttcggttgtgaactaaaggctgacaaagattatcactttaaagtggataatgatgaaaatgagcaccagttatcattaagaacggtcagtttaggagcaggggcaaaagatgagttgcacatcgtagaggcagaagcaatgaactatgaaggcagcccaattaaagtaacactggcaactttgaaaatgtctgtacaaccaacagtttcccttgggggcttcgaaattacaccacctgtggtcttgaggttgaagtgtggttctgggcctgtgcacataagtggacagcacctagtagctgtagaggaagatgcagagtcagaagatgaagatgaggaagatgtaaaactcttaggcatgtctggaaagagatctgctcccggaggtggtaacaaagtcccacagaaaaaagtaaaacttgatgaagatgatgatgaggatgatgaagatgatgaggatgatgaagatgatgatgatgatgattttgatgaagaggaaactgaagaaaaggttccagtgaagaaatctgtacgagataccccagccaaaaatgcacaaaaatcaaaccaaaatgggaaagatttaaaaccatcaacaccaaggtcaaagggtcaagagtccttcaaaaaacaggaaaaaactcccaaaacacccaaaggacctagctctgtagaagacattaaggcaaaaatgcaagcaagtatagaaaaaggtggttctcttcccaaagtggaagccaagttcattaattatgtgaagaattgtttccggatgactgaccaggaggctattcaagatctctggcagtggaggaagtctctttaagaaaatggtttaaacagtttgaaataattctgtcttcatttctgtaatagttgctatctggctgtcctttttataatgcaaagtgagaactttccctactgtgtttgataaatgttgtccaggttcaattgccaagaatgtgttgtctaaaatgcctgtttagttttcaaggatggaactccgccctttacttggttttaagtatgtatggaatgttatgataggacatagtagtagtggtggtcagatgtggaaatggtagggagacaaatatacatgtgaaataaactcagtattttaataaagtaaaaaaaaaaaaaaaaaaaaaaaaaaaaaaaaaaaaaaaaaaaaaaaaaaaaaaaaaaaaaaaaaaaaaaaaaaaaaataaaaaaaaaaaaaaaaaaaaaaaaaaaaaaa

SEQ ID NO: 338 - DNA, 1937 bp, Homo sapiens
ccgacgtcccctcagattccatcgcgatggcccctccatcattctttgcccaggttccacaggccccgccggttctggtctttaagctcattgcggacttccgggatgatcccgatccccgcaaggttaacctcggcgtgggagcgtaccgcacagatgactctcagccctgggttttgccagtagtgacgaaggtcgaacagaagattgctaacgaccacagtctcaaccacgagtacttgcccatcctgggcctggcggagttccggagctgtgcttctcagctagtacttggggacaacagcccagctctcagggagaatggggttgggggtgtgcagtctttgggagcgaccggtgcacttcgaattggagctgacttcttagcgcgatggtacaatggcacagacaacaagaacacgcccgtctacgtatcatcgccgacctgggagaaccataatggcgtgttttctgccgctggttttaaagacattcggtcctatcgctactgggatgcagagaagagaggacttgatctccagggtttcctgaatgatctggagaatgctcctgagttctccatctttgtcctccacgcctgtgcacacaacccaacggggaccgacccaactgaagaggagtggaagcagatcgccgccgtcatgaagcgccgttttctgttccccttctttgactcagcctatcagggctttgcatctggagacctagagaaagatgcctgggctattcgctattttgtgtctgaaggcttcgagctcttctgtccccagtccttctccaagaacttcgggctctacaatgagagagtggggaatctgaccgtggtcggaaaagagcatgacagcgtcctgcgggtcctttcccagatggagaagattgtacgaatcacctggtccaatccccctgcccagggagctcggatcgtggccaccaccctctccaaccctgagctctttaaggagtggaaaggaaacgtgaagacaatggctgaccggattctgaccatgagatccgaactcagggcgcgactagaagctctcaagactcccgggacttggtctcacatcactgagcagattggaatgttcagctttactgggttgaaccccaagcaggtcgagtatttggtcaacgagaagcacatctatctgatgccgagcggtcggatcaacatgtgcggcttgaccaccaagaacctagattatgtggctacctccatcaatgaagctgtcaccaaattccagtgaagaaacaccgagtagttcataccccaaagcagttcctgtcacagctttcctgcctgcgcaaacctagccgtacatgttgtttattagagatgaccaccatggggaggcagccgctgtttagctggccccacaagagaagacatttcttgaaatgaacctgggtcgggtggggggatgactggggttagggccttttggaaaccagagcagattaaagttatttaagaataaaaaaaccctttgatatgagatgtaatcatcttgccttcctctgtagtattctgcaggagtgttgcccacgaagccgtgggcttctgcacgttgcttgagtctgtacagagtcctgtccccaaaatcaagttgtctgaggagccggctgtgactgtggatgttggcattaaaactcaccatttccatcgtctctgtctctcggccccctgatctttccgcatggttgtgaccctggtcttggaacattagttttttaaggccactgtggccagtatttatatcatgacacacaagtggatttacatatttaactgagatgaaagttccgctaaacggtatttgctcttgtgatacgtggcacattgtgacattttcttagtctcttctgtcgtgttctgtttcatttaaaaaaataaaaatgctgatcaagacaaacgg

SEQ ID NO: 339 - DNA, 2259 bp, Homo sapiens
ctggctactatgctggacacaggactgctcctggtggtcatactggcctccctaagtgtcatgttcttggtgtccctctggcagcagaaaatcagggagagattgcctccaggacccactcctttgcctttcattggaaattatctgcagctgaatatgaaagacgtatacagttccatcacacagctcagtgagcgctatggtcctgtgttcaccattcaccttgggcctcgacggattgttgtgctttatggatacgatgcagtcaaagaggctttggtggaccaagctgaggagttcagtggacgtggcgaactgcctacctttaatatactcttcaaaggctatggtttttcattgagcaatgtggaacaggccaagcgtatcaggcgcttcaccatagccacattgagagattttggtgtgggcaagcgtgatgtacaggagtgtatcctggaggaggcaggctatttgatcaagacgttgcagggcacttgtggagcccccattgacccttccatctacctgagcaaaacagtctccaatgtcattaactccattgtcttcgggaaccgcttcgactatgaggacaaagagttcttgtcactgttggagatgatcgatgaaatgaatatatttgcagcctcagccacagggcagctctatgacatgttccattcagtgatgaagtacctgcctggaccacagcaacagatcatcaaggttactcagaaactggaagacttcatgatagagaaagtgaggcagaaccatagtaccctggaccccaattccccaaggaacttcattgactcctttctcatccgcatgcaagaggagaaatatgttaattcagaattccacatgaacaacctagtgatgtcatcattaggcctcctctttgctgggactgggtcagtcagctccacgctataccatggtttcctgctactcatgaagcatccagatgtggaagccaaggtccatgaggaaattgagcgagtgatcggcaggaaccgacagcctcagtatgaggaccacatgaagatgccctacacccaggctgtgatcaatgagatccaaagattttctaacttggctcccttgggcattcctcgaaggattatcaagaacacaaccttccgtggcttcttcctccccaagggcaccgatgtattccctataataggttctctgatgacagaaccaaagttcttccctaaccacaaagacttcaacccccagcacttcctggatgacaagggacagttgaagaagaatgctgcatttctccctttttccattggaaagcgattctgcttgggagatagcctggctaaaatggagctcttcctgctgctcaccaccatcttgcagaacttccgttttaagttcccaatgaatctagaagacatcaacgagtaccccagtcccatagggtttaccaggatcataccaaattacaccatgagcttcatgcccatctgattctgagttgaatcaaggtggggcaagagggagggagagcctgaagtggggccagggtgcaggtggagagaacagagaagatgaagatgagggttaagaagggaccacacccatggaagaaacacaaaagacttctcagtttggtaaaattgtaacagtcctaataaaaagaaagaaacacccagtaggcagcagtaacaacaactgagactcatggggcaaaggtggctcacctctgcagaagctgtcctgcccttctctcactcagtcctctacacaagagcagcatgtccccaagcccaacgtacaggttcaaaagatagaacttaaaaaatttgaacctaaactgaggtggaaaagacacagttagctaggattgacacattggactctatcaccagcattcaggagggagggaacatggctccctaggaggcctgccagaattacaaagtgaaactcatctcaaaaaaggaacaacagaaaataaaatttcaaattgatttctcttagaccataagagtccagatctgtatccaaagctatttggttatattttttgttattgttgttttgtttacacattgtgtttttctttcggtttgtaagtctgtttgggatatttaatttacatttactgattagtgtgggtggtagggcataccatggctcaaatgtggaaaccaaagaaaagcttttggaagtgtcatctcccttacaatacgtgtgtccaagaactcaaattcagacaataaagcttgatagcaagca

SEQ ID NO: 340 - DNA, 1589 bp, Homo sapiens
ctttccatccacgtacagcagcaccatgaaccgcgcattctgtctcctcgctcgctcgcgtcgcttcccgcgggtcccctccgccggtgctgtattgtcaggggaagcggccaccctcccacggtgtgctccgaacgtcgtgcgaatggcaagccaaaattccttccgtatagaatacgacacctttggtgaactgaaggtcccaaccgataagtattatggtgctcagactgtaagatctacgatgaactttaagattggaggtgcgacggagagaatgccaatcccagtcattaaagcatttggcatcttgaagcgagctgctgctgaagtgaaccaggagtatggtctcgatcccaagattgctagtgcaataatgaaggccgcagatgaggtagctgaaggtaaattaaacgatcactttcctctggtggtatggcagactgggtcaggaacccagacgaacatgaatgtaaatgaagtcattagcaacagggcaatcgaaatgctaggaggtgaacttggcagcaagaagcccgtgcaccccaatgatcacgttaacaaaagccagagctcgaatgacaccttccccacagcaatgcacattgctgctgcactggaagttcaccaggtcctgttgccaggattacagaagctgcacgatgccctcagtgcaaaatccaaagagttcgcgcaggtcataaaaattgggcggactcatacgcaggacgctgtccctcttactcttggacaggagttcagtggttatgttcagcaagtccagtatgcgatggagaggataaaagctgccatgcccagaatctacgagctcgctgctggcggcactgccgtcggcacgggactaaacaccaggatcggcttcgcagaaaaggtggctgcaaaagtcgcagcactcacaggtttgccttttgtcactgccccgaataagtttgaagctctggccgctcatgatgctctggtggagcttagtggagccatgaacactacggcctgcagtctgatgaagattgccaatgacattcgcttcctcggttctggtcctcggtccggtttgggggagctgatcttgcctgaaaatgagccagggagcagcataatgccaggaaaggtgaaccctactcagtgtgaggcgatgaccatggttgcagcccaagtcatggggaatcatgtcgctgttactgttggaggcagcaatggacatttcgaactgaatgtttttaaaccgatgatgattaagaatgtgttgcactcagccaggctactgggagatgcttcagtgtccttcacagagaactgtgtggtagggatccaggccaacacagagaggatcaacaagctaatgaacgagtctttaatgttggttacagctcttaatccgcatatagggtatgacaaagcagcgaagattgccaagactgcacacaagaacggatcaaccttaaagaaaacggctattgaacttggctatctcacagcagagcagtttgatgagtgggtgaaacccaaggacatgctgggtccaaagtgacttaaataaatttatattaaaataaacatgtatgaaattt

SEQ ID NO: 341 - DNA, 2442 bp, Homo sapiens
gacagaaaacctagagatggaattaaattatggccagctctcacaaggtcaactttgatgtattacgtgaatgatggagtgtatgggtcatttaactgcattctttatgaccatgcacatgtcagtccctgcagccgccgccgccggccgccttcagtcagcagctcggcgccacctccggtcggcgactgcggcgggctcgacgaggcggctgacggggcggcggcgggaagacggccgggtgcgccttggggtttagtggcggcttctccatgggtccagccagccgcttccctgtgctgtgagtgtttccaccactccaggagacagcattcagagttgaccttgtgagagctggccataatttaattccatctctaggttttctgtcttattgtttcagaggcacatcgagaaccaaccatgggcagctttactaaggaagagtttgactgccatatcctcgatgaaggtttcactgctaaggacattctggaccaaaaaatcaatgaagtttcttcctctgatgataaggatgctttctatgttgcggacctcggagacgttctaaagaagcatctgaggtggctgaaagctcttccccgtgttactcccttctatgctgtcaagtgtaatgacagcagagccatagtgagcaccctggctgccattgggacaggatttgattgtgcaagcaagactgaaatacagttggtgcaggggcttggggtgcctccagagaggattatctatgcaaatccttgtaagcaagtgtctcagatcaagtatgctgccagtaatggagtccagatgatgacttttgacagtgaaattgagttgatgaaagttgccagagcacatccaaaggcaaagttggttttgcggattgccactgatgattccaaagcagtttgtcggctcagtgttaagtttggtgccacactgaaaaccagcaggcttctcttggaacgggcaaaagagctaaatattgatgtcattggtgtcagcttccatgtgggcagtgggtgtactgaccctgagaccttcgtgcaggcagtgtcagatgcccggtgtgtctttgacatgggaacagaagttggtttcagcatgtatctgcttgacattggtggtggctttcctgggtctgaagacacgaagcttaaatttgaggagatcaccagtgtaatcaacccagctctggacaagtacttcccatcggactctggagtgagaatcatagctgagccaggcagatactacgtcgcatcagctttcacacttgcagtgaatatcattgccaaaaaaaccgtgtggaaggagcagaccggctcggacgatgaagatgagtcaaacgagcaaactttgatgtattacgtgaatgatggagtgtatgggtcatttaactgcattctttatgaccatgcacatgtgaaggccctgctgcagaagagacccaagccagatgagaagtattactcatccagcatctggggaccaacatgtgatggccttgatcggatcgtcgagcgctgtagcctgcctgaaatgcatgtgggtgattggatgctgtttgagaacatgggtgcatacactgttgctgctgcttctactttcaatgggttccagaggccaaacatctactacgtaatgtcacggtcaatgtggcaactcatgaagcaaatccagagccatggcttcccgccagaagtggaggagcaggatgttggcactctgcccatgtcttgtgcccaggagagcgggatggaccgtcaccctgcagcctgtgcttctgctagtatcaatgtatagatgccattcttgtagctcttacctgcaagtttagcttgagttcacggcatttggggggaccatttaacttaattactgctagtttggaatgtctttgtaagagtagggttggcaccaatgcagtatggaaagactaggagatgggggtcacacttactgtgttcctatggaaactttgaatattttatatggatttttattcacttttcagacctgatactaatgagtgcccctcggctgctgagcaagcatttgtagcttgtacattggcagaatgggctaaaagcttatgttgtgacccattttgaaaataaagtatcttgaaatgattggacattggagaatgtgtgcaagtatcccttacagaaggcacaaacttctgcacaggctgtgtgttacagcagtgagtctagcccagcagagatgtggatgatacaaagctgtgccccctctgtacagcatcaatgtgcttagcccatctcaagtgtttactgtgaacttggtgcccaaagtctcttaagagtgtcatctgcctagtggcctcttgacttggccacttcctaaggagagggcatctgaggctctttgaaccttgcctgcagaaaccctgactgctccctcaacccttggccg

SEQ ID NO: 342 - DNA, 2442 bp, Homo sapiens; identical to SEQ ID NO: 341

SEQ ID NO: 343 - DNA, 1393 bp, Homo sapiens; identical to SEQ ID NO: 337

SEQ ID NO: 344 - DNA, 879 bp, Homo sapiens
taatcttcaaacttctcatggtaccactgatggagttggatgagctgtgcctgctcgacatgctggtctacttggaaggtttcatggccttcgtgtccattgtggggctccggtcggttggctctccgtacggccgctactcgccgcagtggcccggcatccgagtgcccgcgcgacctgcctggttcatacaggagctgccctcgatggcctggccgctgtacgagtacattcgtcctgcagccgcgcgactgggcaacctgcctaaccgcgtcctgctggctatgtttctgatccactacgtgcaaaggacgctggttttcccggttctgatcaggggagggaagcccaccctcctggtcacctttgtcttggccttcctgttctgcaccttcaacggctatgtacagagcagatacttgagccagtttgcggtttatgctgaagactgggtgacccatccctgtttcctgacaggctttgccctgtggttagtgggcatggtgataaatatccactcagaccacatcctgaggaatctgagaaaaccaggggaaactggatacaagatacccaggggaggcctgtttgaatacgtatctgcagccaactattttggggagctcgtggagtggtgtggctttgcactggccagctggtccctccagggtgtagtgtttgcactgttcacactcagcacactgctcaccagagcgaagcagcaccatcagtggtaccatgagaagtttgaagattaccccaagtcaagaaaaatactgattccatttgtgctttagtgctctgttagcgctgttgcctcccatgagctgagtctgtctgtctccctggtgactttgctctgagcacttacgaatgaat

SEQ ID NO: 345 - DNA, 879 bp, Homo sapiens; identical to SEQ ID NO: 344

SEQ ID NO: 346 - DNA, 2343 bp, Homo sapiens; identical to SEQ ID NO: 296

SEQ ID NO: 347 - DNA, 4269 bp, Homo sapiens
taagctggtgcttacggacagagagccacactcgggctttctcgaagaggtaaaccaggtccctctgcagccatgtcagccaaggcaatttcagagcagaccggcaaagaactcctttacaagtacatctgtaccacctcagccatccagaaccggttcaagtatgcccgggttactcccgacacagactgggcccatctcctgcaggaccacccctggctgcttagccagagcttggtagtcaagccggaccagctgatcaaacgtcgaggaaagcttggtctagtcggggtcaacctctctctggatggagtcaaatcctggctgaaacctcgactgggacatgaggccaccgtcggcaaggccaaaggcttcctcaagaactttctgattgagcccttcgtcccccacagtcaggcggaggagttctacgtgtgcatctatgctacccgggaaggagactacgtcctgttccaccatgaagggggtgtggatgtgggcgatgtggacaccaaagcccagaagctgcttgtgggtgtggacgagaaactgaacgctgaagacattaagagacacctgttggtccacgcccccgaagacaagaaagaaatcctggccagcttcatctccggcctattcaatttctacgaagatctttacttcacctaccttgagatcaacccccttgtggtgaccaaagatggtgtctacatccttgacctggcggccaaggtggacgccactgctgactacatctgcaaagtcaagtggggtgatatagagttccctcccccctttgggcgtgaggcatacccagaggaagcctacattgcagacctggatgccaaaagtggggcgagcttgaagctgaccttgctgaaccccaaggggcggatctggaccatggttgccgggggtggcgcctctgtcgtgtacagtgataccatctgtgatcttggaggtgtcaacgaactggcgaattacggggagtactctggtgcccccagtgaacaacagacctatgactacgccaagaccatcctctcacttatgactcgagagaagcacccggatggcaagatcctcatcattggaggcagcattgcaaacttcaccaacgtggccgccaccttcaagggcattgtgagagcaattcgagattaccagggttccctgaaggagcacgaggtcaccatctttgttcgaagaggtggcccgaactatcaagagggattacgagtgatgggagaagttgggaagaccactggaatccccatccatgtctttggcacagaaactcacatgacggccattgtgggcatggcctgggcaccggccattcccaaccagccacccacagcggctcacactgccaacttcctccttaatgccagtgggagcacatcgacaccagcacccagcaggacagcgtctttttccgagtccagagctgacgaggtggcccctgcaaagaaagccaagccagccatgccccaagattcagtcccaagtccaagatccctgcaaggaaagagtgccaccctcttcagccgacataccaaggctatcgtatggggcatgcagacccgggctgtgcaaggcatgctggactttgactacgtgtgctcccgagatgagccttcagtggctgctatggtctacccgttcacgggggatcataagcagaagttttactggggacacaaggaaatcctgatccctgtcttcaagaacatggctgacgccatgaaaaagcatccggaggtagacgtgctgatcaactttgcatctctgcgatcggcttatgacagcaccatggagaccatgaactatgcacagatccggaccatagccatcatagcagaaggcatccctgaggctctcacacggaagctcatcaagaaggcagaccagaagggcgtgaccatcattgggccagccacggttgggggcatcaagcctggatgctttaagattgggaatactggtgggatgctggacaacatcctggcctccaaactgtatcgcccaggcagtgtggcctacgtctcgcgttcaggaggcatgtctaacgaactcaataatatcatctctcggaccacagatggtgtctacgagggtgttgccatcggcggggacaggtaccctgggtccacattcatggatcacgtgctgcgttaccaagacactccaggagtcaagatgattgtagttcttggggagatagggggtacagaagaatataagatctgccggggcatcaaggagggccgcctcaccaagccagtggtctgctggtgcatcgggacctgtgccaccatgttctcttctgaggtccagtttggccacgctggggcttgtgccaaccaggcttctgaaacggcagtagccaagaaccaggccttgaaggaagcgggagtgtttgtgccccgaagctttgatgagctcggagaaatcattcagtccgtgtatgaagatcttgtggccaaaggcgccattgtacctgctcaggaagtgccacctccaacagtacccatggactactcttgggccagggagctgggtttaatccgaaaacctgcctcattcatgaccagcatctgtgacgagcgggggcaggaactcatttatgcgggcatgcccatcaccgaggtcttcaaggaagagatgggcattggtggtgtcctgggcctcctctggttccagagaaggttgcccaagtattcctgccagttcattgagatgtgtctcatggtcaccgctgatcacgggccagctgtctccggggcccataacactatcatctgtgctcgggctgggaaggacctggtctccagcctcacctcagggctgctcaccattggggaccggtttgggggtgccttggacgcagcagcgaagatgttcagtaaagcctttgacagcggcattattcccatggagtttgtgaacaagatgaagaaggaggggaaactgatcatgggcatcggccatcgagtcaaatcgataaacaacccagacatgcgagtgcagatcctcaaagactttgtcaaacagcacttccccgccaccccgctgctcgactatgcactggaagtggagaaaatcaccacctcaaagaagccaaatcttatcctgaacgtggatggtttcatcggcgttgcgtttgtggacatgcttaggaactgtggctccttcacccgggaggaagctgacgagtatgttgacattggagccctcaatggcgtctttgtgctgggaaggagtatgggcttcatcgggcactatcttgaccagaagaggctgaagcaagggctgtatcgtcacccctgggacgacatttcctatgttctcccggaacacatgagcatgtaaccgagccagcagccctaccgtagaaaaaggaagacaaaaactccctcctcgacaatatagcggacagacagctggaaacagagcccgttatgggctgggcctggaatggaaatagccattgatgtgcaggcatggaaagccaacaccacaggcccattcagtccacacagagaagcttagtatttttttttatatatatatctatatatatataagcatagaaatttaaaaccaagccaatacttgtgacgtttgcgctgctacctgctgtatctattacatggaagactgtaagcaagcgctgtcagaataatgttcttctagggccttatgatgttgctttctttttttaattagttgaaaatttatttttcctctagaactagtggatccgacttttaagacttcaggatactatctgtttgtaggaccactgtctggtatcccacctcccactcatcttcacaccacatgaagaacactgtattaatctgattttttaggatctttttttttttttttgtgttatgtgttaagggtttatttagtatcccactgaaacgttctgtgtttcggaccaatgtctacttatgtcaaggggaggagggttggggccattgtacccttagccatcgtcacacatgtggagtagtaacttaaatgtaaagttgtaacatacaagtgtttaaaatggaaaccgcaaagcaaaaagctgtgaaacgtctcgtgtcttgtgttctctgtgttcatgcagctgacttgtctgttactgaagtgtgggtccaaagactcacatctgttccgcatctgtaacccacagagattctggcagctgccacctcagtctcttctctgtattatcatgtttggtttaaataaactagatagtaaaaa

SEQ ID NO: 348 - DNA, 4269 bp, Homo sapiens; identical to SEQ ID NO: 347

SEQ ID NO: 349 - DNA, 1021 bp, Homo sapiens
acagagttccatcatgagaacctcatgatctccctgctctctctcttctttgctggcactgagaccggcagcaccacactccgctatggtttcctgctgatgctcaagtacccccatgtcgcagagaaagtccaaaaggagattgatcaggtgattggctctcacaggccaccatcccttgatgatcgtaccaaaatgccatacactgatgcagtcatccacgagattcagagatttgcagatcttgccccaattggtttaccacacagagtcaccaaagacaccatgttccgagggtacctgctccccaagaacactgaggtgtatcccatcctgagttcagctctccatgacccacagtactttgaccatccagacaccttcaatcctgagcacttcctggatgccgatgggacactgaaaaagagtgaagcttttatgcccttctccacaggaaagcgcatttgtcttgacgaaggcattgcccgaaatgaattgttcctcttcttcaccaccatcctccagaacttctctgtgtcaagccatttggctcccaaggacattgacctcacgcccaaggagagtgacattgcaaaaatacctccaacataccagatctgcttctcagctcggtgatcgggctgaggcagccaggtgccccagttctgttgggaatggcctcatgtttctgcctctgggggacctgctgaaaaccaggctcaaggccactgctcacatcttcctattgcagttctccaaagtcccaaggcttgttcttattcctgtgaatggcactgaagaagtcaatcgactgtcttattttgacatgtgaacagagatttcatgagtacacatctcatgctgagtcacttccctcttcctcctaatagcccacgtccccacttatcagccctccatggtctgtgatctgtgctaatggactctgtatatggtctcagtgctatgtctacagacttacatagtatgtatggttcaggtaaacagaatcacagagtgtgtg

SEQ ID NO: 350 - DNA, 2528 bp, Homo sapiens
ggagtgttcactgaagtcaacagtggttagaccaggaccatggaattcggtgtcttgctcctcctcactctcactgtgggcttcttgctattcttagtcagccaaagtcagccaaagacccatgggcacttgccaccaggacctcgtcccctgcccttcttggggaacctcttacagatgaacagaagaggctttctgaattctttcatgcagcttcaagaaaaatatggagatgtgttcacagtacacctgggaccaaggcccgtggtcatattgtgtgggacagacaccataagagaggctctggtggaccaagctgaagctttctctggtcggggaacagttgctgtgctccatccagttgtacagggatatggtgtgatctttgccactggggaacgttggaagacccttcggcgattctctctggtcaccatgaaagaattcggaatgggaaagcggagtgtagatgagaggataaaggaggaggcccagtgtttggtggaggagctgaagaaatacaagggagcccccctgaaccccaccttcctcttccaatccatcgcagcaaacaccatctgctccattgtctttggagagcgctttgactacaaagaccaccagttcctgcatctgctggatctagtctataagacatctgtccttatgggctccttgtccagccaggtgtttgagctttactctggcttcctgaaatactttcctggtgcccacaaacaaatcttcaaaaacctacaggaaatgctcaactacattggccatattgtggagaagcacagggcaaccttggaccccagtgctccacgagatttcatcgatacttaccttctgcgcatggagaaggagaagtccaaccatcacacagagttcaatcaccagaaccttgtgatctctgtgctctctctcttctttgctggcaccgagaccaccagcaccacgctccgttgcaccttcctgatcatgctcaagtacccccacgttgcagagaaagtccaaaaggagattgatcaggtgattggctcacaccggctaccaacccctgatgatcgtaccaaaatgccatatactgatgcagtcatccatgagattcagagatttgcagatctgaccccgattggtctaccacacagagtcaccaaagacaccgtgttccgagggtacctgcttcccaagaacactgaggtgtaccccatcctgagttcagctctccatgacccacggtactttgaacaaccagacactttcaatcctgagcacttcctggatgccaatggggcactgaagaagagtgaagcttttctgcccttctctacaggaaagcgcatttgtcttggagaaggcattgcccgaaatgaattgttcattttcttcaccgccatcctgcagaacttcactttggcaagccctgtggctcctgaggacattgacctcactcccattaacattggtgtaggcaaaataccctctccataccagataaacttcctgtcccgttgaataggttgagagagaagagtcaatggaatgacgtgtccccagtgccgtaccctatgaatggaatagtaaaacctaatgaagtggctttcttgttacatagacagagagacttctggaggccacagcttgttgtgagacacctctctcatgcttgttcacagccatagtccctacttgttaggaatctagactccaggatctgtgggaacagaccagagatggtttctcttgagttggctccattctaatcccatgtggtgtgttggggggtcatgtttgaggacccccttcgtagatgagtaacagaccctatgatggcatcacagtgctagtgagtagtggggaacaaaattatgctgtgagtctagaagagcaaccccctctcctgcttctgtttcaattcagatgaaattcatataacgaagctgacaaaatcttttaattttgtattctggccagaggctcatgtagttcacactgacctcaaaatcctatatacatccaaagatgtcttgaaatctcgatctcctgaccagtgctggcatcacagccacatggacgtatacccagattttaaagtgactatatcataatgtttatattttaatctcctttaatttatttgcaatattacaacttcactatctaattccaggtattttgtcacacttaaccaacaccaccaaaagccccaacctattcaaagatcaatccctcatcccctctctccataacctcccctgcactcaacacccaccgtgccacttttgtcacacttaaccaacaccaccaaaagccccaacctattcaaagatcaatccctcatcccctctctccataacctcccctgcactcaacacccaccgtgccacttttgtctgacttttgtgtcattggactgtcctgaattgtgtgtctcatagaaaaacaacgacatgatctttaatgctggctgacttttttgccacacccaacttctcaggcccctgactgtggcctgcacagtacag

SEQ ID NO: 351 - DNA, 1178 bp, Homo sapiens
acattaaccaactgtttagcaactcaggcatgactttgcatttttcttctaatctttcatagaaatttctggccactggacactgtgggagcagcttttaccttattggactatctccccttaagtgggaagggcttagtcaaatgcagtaaagagctataaaacaccgagaactcttgatgtgttgtgaaacttagagggagcagctttttaacaagagaactcaagcaattgctgccatgccggggaagccagtccttcactacttcgatggcagggggagaatggagcccatccggtggctcctggctgcagctggagtagagtttgaagaacaatttctgaaaactcgggatgacctggccaggctaaggaatgatgggagtttgatgttccagcaagtgcccatggtggagattgatgggatgaagctggtgcagaccagagccattctcaactacattgccaccaaatacaacctctatgggaaggacatgaaggagagagccctcatcgacatgtatgcagaaggagtggcggatctggatgaaatagttctccattacccttacattccccctggggagaaagaggcaagtcttgccaaaatcaaggacaaagcaaggaaccgttactttcctgcctttgaaaaggtgttgaagagccatggacaagattatctcgttggcaataggctgagcagggctgatgtttacctagttcaagttctctaccatgtggaagagctggaccccagcgctttggccaacttccctctgctgaaggccctgagaaccagagtcagcaacctccccacagtgaagaagtttcttcagcctggcagccagaggaagccattagaggatgagaaatgtgtagaatctgcagttaagatcttcagttaattcaggcatctatggatacactgtacccacaaagccagccttcgaaagctttgcaacaatcgcatattttgactaaatgttgaccctacttattgggaggccaacacgttttctaatgcttctgtgttaattcatatagacatgactgatgaggaattgctgggatgctatttggttgtagttaaaatttgaaatcatgatcacttcctcagatattactttgaatctcaataaaaacttcgcaagcttcttaaaaaaaaaaaaaaaaaaaaa

SEQ ID NO: 352 - DNA, 1606 bp, Homo sapiens
ctgcagtcaagtgtactgggtgccaaggggacacagcttccttctaactggttgagcaagctgctaaagaaagagttggccgcccactgaggcagtcatgcagacctgaagtgacaagcagaagcctggcaggtttgtccctgggtagatggatcgcctgatacggacactggcgaccaaacgctgggattggctcaaaacaaggccgtgttgatccagtgactgggttttggcgtcctgtcaatctgctgtctgctcaaaagcctagaaatagtgcgggggcagtttgctggtctctgagaaaggaagcagccatgcaagtgctaacgaaacgctaccccaagaattgcctactgaaggtcatggatcggtactcggctgtggtgcggaacatggagcaagtggtgatgatccccagccttctgagggatgtggagctgagtgggtccggaggctcggtccaggacggagcccccgatctctatacctacttcaccatgctcaagagcatctgtgtagaagtagaccacgggctgctgccgcgggaggaatggcaggccaaggtggcaggcaatgaaggcagtgaggctgagaatgaggctgctgaaacagaggaggctgaggaagacaggctttcggaggagctggacctagaagcccagttccacctgcacttctccagcctccatcacatccttacccacctgacccagaaagcacaggaggtgacgcagaaataccaggaaatgacggggcaggtcctgtaggtcttcgactctatggaagatcactttacacgagagggaagacgatgaggacccagcggtgcatcagccccgagaccaggaaggaagacctggacccaggtggatgcgaaggcggctcctgtccctggtgtcccccacctccctctgagcgcatctgtggacttgctgcaggctcacctttaagatgtctgttgtgattcccaacttctcttccatgtcttagcagtttgaggtttcacaggcagcaagtatcagtagaaggcagaggtaatagcaagcggccagagttcacatcccatccctgggatgtcctttagtgcctggggtcacagttactctttcatgtataaagcagggacgctgtatttacctcacaaggttactaaacggacacggaatcaaaggcacctgtcacgtgcggatgtctgaacagctggtgtttctcttaccttcctcagagagcatgctctgtgtagctcttgcttttgaccctcacccaggaaaaggttgaggtagttgagtgtgtgggatgagcttctcatcctgttggatctgatgaggctgagcacaagtgaactatgcaactattatagtagcaattaaaaaatacatggcatgctgatctttttttttcttcttcttattgattcttcatgaatttcacatcatgacccccagtcccattcatcttctgcctccatcttcttcgtccctccatatctgccctccacccttgcaacttcctccacaaaagaaaacaaacaaataaacaaaacttcgctgtggaagctacggtgtgtcacacagtctacccttttcccaaacagcttttcctgcag

SEQ ID NO: 353 - DNA, 1417 bp, Homo sapiens
agagggaacctttaatcatgaagctaattactatcctgctcctctgctccaggctcctgccaagtttagcgcaggaagaaggcgcccaggaattgaactgcaatgatgagactgtatttcaggctgtggatactgctctgaagaaatataacgctgagttagaaagcggcaaccagtttgtgttgtaccgagtgactaagggcactaagaaggatggcgctgaaacattgtattccttcaagtatcaaatcaaggagggcaactgctctgttcagagtggcctcacctggcaggactgtgacttcaaggacgctgaggaagccgctactggcgaatgcacaacaactttggggaagaaagaaaataaattctccgtagccacccagatctgcaatattactccaggtaagggtcctaagaagacagaggaggacctctgtgtcgggtgtttccaacccataccgatggatagctcagacctgaagcctgttctgaaacacgctgtggagcattccaacaacaacacgaagcacacccacctctttgctctcagagaagtaaagagtgcccactcacaggtggtggctggcatgaattataaaattatctactccattgtgcaaacaaattgttcaaaggaggattttccttccctccgtgaagactgtgtaccccttccctatggcgatcatggtgagtgtacgggtcatacccacgtggatattcataacacaattgccggcttctcacagagctgtgacctttatccaggagatgatttgtttgaactacttcccaagaattgccgtggctgccccagggagatacctgtagacagcccggagctgaaggaggcacttggtcattccattgcacagcttaatgcacagcataaccatattttctatttcaagattgacaccgtgaaaaaggcaacatcacaggtggttgctggagtaatatatgtgattgagttcatagccagagaaactaactgttccaagcaaagtaaaacagaactgacagcggattgtgagaccaaacacctcggtcaaagcctcaactgcaatgctaacgtgtacatgagaccttgggagaacaaagtcgtcccgactgtcagatgccaagcactagatatgatgatttctaggcctccaggattttcacctttccggctggtgcgagtacaagaaactaaagaaggaacaactaggctcctaaactcatgtgagtacaagggcagactctcaaaggcaagggcaggcccagcacctgaccatcaggcagaagcttcaaccgtgacatcatagcctggcaaagacccggagtggaaggaccagaagactcctgggatgtgtgcagtatggaagcatgtttcttcatcacctgatcctgggtgaaataaagttcagactcg

SEQ ID NO: 354 - DNA, 1389 bp, Homo sapiens
tgctcctctgctccaggctcctgccaagtttagcgcaggaagaaggcgcccaggaattgaactgcaatgatgagactgtatttcaggctgtggatactgctctgaagaaatataacgctgagttagaaagcggcaaccagtttgtgttgtaccgagtgactgagggcactaagaaggatggcgctgaaacattgtattccttcaagtatcaaatcaaggagggcaactgctctgttcagagtggcctcacctggcaggactgtgacttcaaggacgctgaggaagccgctactggcgaatgcacaacaactttggggaagaaagaaaataaattctccgtagccacccagatctgcaatattactccaggtaagggtcctaagaagacagaggaggacctctgtgtcgggtgtttccaacccataccgatggatagctcagacctgaagcctgttctgaaacacgctgtggagcatttcaacaacaacacgaagcacacccacctctttgctctcagagaagtaaagagtgcccactcacaggtggtggctggcatgaattataaaattatctactccattgtgcaaacaaattgttcaaaggaggattttccttccctccatgaagactgtgtaccccttccctatggcgatcatggtgagtgtacgggtcatacccacgtggatattcataacacaattgccggcttctcacagagctgtgacctttatccaggagatgatttgtttgaactacttcccaagaattgccgtggctgccccagggagatacctgtagacagcccggagctgaaggaggcacttggtcattccattgcgagacttaatgcacagcataaccatattttctatttcaagattgacaccgtgaaaaaggcaacatcacaggtggttgctggagtaatatatgtgattgagttcatagccagagaaactaactgttccaagcaaagtaaaacagaactgacagcggattgtgagaccaaacacctcggtcaaagcctcaactgcaatgctaacgtgtacatgagaccttgggagaacaaagtcgtcccgactgtcagatgccaagcactagatatgatgatttctaggcctccaggattttcacctttccggctggtgcgagtacaagaaactaaagaaggaacgactaggctcctaaactcatgtgagtacaagggcagactctcaaaggcaggggcaggcccagcacctgagcgtcaggcagaagcttcaaccgtgacaccatagcccggcaaagacccggagtggaaggaccagaagactcctgggatgtgtgcagcatggaagcatgtttcttcatcacctgatcctgggtgaaataaagttcagactcgacgagttc

SEQ ID NO: 355 - DNA, 1519 bp, Homo sapiens
tgcaactgaaagcattcttagcttgccagtggcccccactgcctgcctgcctgcggaactctctagaccatagattcctcctccactctagcaagagaagatgctgtctaatttgaggatcctgctcaacaaggcagctcttagaaaggctcacacttccatggttcgaaattttcggtatgggaagccagtccagagtcaagtacagctgaaaggccgtgacctcctcaccctgaagaacttcacaggagaggagattcagtacatgctatggctctctgcagatctgaaattcaggatcaaacagaaaggagaatacttgcctttattgcaagggaaatccttagggatgatttttgagaaaagaagtactcgaacaagactgtccacagaaacaggcttcgctcttctgggaggacatccttcttttcttaccacacaagacattcacttgggcgtgaatgaaagtctcacagacacagctcgtgtgttatctagcatgacagatgcagtgttagctcgagtgtataaacaatcagatctggacatcctggctaaggaagcaaccatcccaattgtcaacggactgtcagacctgtatcatcctatccagatcctggctgattaccttacactccaggaacactatggctctctcaaaggtctcaccctcagctggataggagatgggaacaatatcctgcactccatcatgatgagtgctgcaaaattcgggatgcaccttcaagcagctactccaaagggttatgagccagatcctaatatagtcaagctagcagagcagtatgccaaggagaatggtaccaggttgtcaatgacaaatgatccactggaagcagcacgtggaggcaatgtattaattacagatacttggataagcatgggacaagaggatgagaagaaaaagcgtcttcaagctttccaaggttaccaggttacaatgaagactgctaaagtggctgcgtctgactggacgtttttacactgcttgcctagaaagccagaagaagtagatgatgaagtgttttattctccgcggtcattagtgttcccagaggcagaaaatagaaagtggacaatcatggctgtcatggtatccctgctgacagactactcacctgtgctccagaagccaaagttctgatgcctgcaagaggacgaaaaacccaaaagacaaaaaaatctgttctttagcagcagaataagtcagtttatgtagaaaagagaagaattgaaattgtaaacacatccctagtgcgtgatataattatgtaattgctttgctattgtgagaattgcttaaagcttttagtttaagtgctgggcattttattatcctgcttgacttgacttaagcactctcttcaattcacaacttctgaatgatatttgggtttcatattaattatcatacacatttccttccactaagcattaaacactatgcttacaatgcataccatctaagtcattaaatgtaatccatgcttattacctt

SEQ ID NO: 356 - DNA, 593 bp, Homo sapiens
ggctgcagcctcctctcgctaaggaaaggctgcctgcccgttctagggagtcagtggttagcaagttggtcagggccccggggctactgtgtctctctgacttacagacgatgaccactggatcatcgatacggactacgacaccttcgctctgcagtattcctgccgcctgcagaatctggatggcacctgtgcagacagctactcctttgtgttttctcgtgaccccaatggcctgaccccggagacacggaggctggtgaggcagcgacaggaggagctgtgcctagagaggcagtacagatggatcgagcacaatggtggagcaactcttcctgagggacttagcagggctgggaggataagaggtgcagcatctgtgcaagtgggttacccgaggcctcctttggaccaagtctgattaaatttttccaggactgccatcagccacacagacaaggaccaaaggtttctcttcccctaaacgctaggcacttttctataaccaaagttgtgaaaccactctcttcttatgtttttgctccccacatttgctgctagtgcacaagccgagaccatcgcaagataaggtt

SEQ ID NO: 357 - DNA, 8329 bp, Homo sapiens
ctcgcacccgctgcactgcacaggggaagaaaaggagcccagggtgtgagccggccagcggccacaacttctggtcctctcccgtgtcctccttccatcttcttacaggcgtccccacctcaggacttttcctgcaggctgcgaggggaaccaacttcgtggccactagcctcctggagagggcgactctcctcccatccactcaagatgctcaggggtccgggacccgggcggctgctgctgctagcagtcctgtgcctggggacatcggtgcgctgcaccgaaaccgggaagagcaagaggcaggctcagcaaatcgtgcagcctccgtccccggtggctgtcagtcagagcaagcctggctgttttgacaacgggaagcattatcagataaatcagcagtgggaacggacctacctaggcaacgccctggtttgtacctgctatggaggaagcagaggttttaactgcgagagcaagcctgaacctgaagagacctgttttgacaaatacactggaaacacttacaaagtgggtgacacttatgagcgccctaaagattccatgatctgggactgtacctgcattggggctgggcgaggcaggatcagctgtaccattgcaaatcgctgccatgaagggggtcagtcctacaagattggtgacaagtggaggaggccacatgagactggtggctatatgttggagtgtttgtgtctggggaatggaaaaggggaatggacctgcaagccaatagctgagaaatgttttgatcacgctgctgggacttcctacgtcgtgggggagacctgggaaaagccctaccaaggctggatgatggtggactgtacttgtctgggcgaaggcaatgggcgtatcacctgcacctcccggaacagatgcaatgatcaggacaccaggacgtcctacagaattggagacacatggagcaagaaggacaacagagggaacctgctccagtgtgtctgcacaggcaacggcagaggggagtggaagtgtgagcgacatgttctacagagtgcttcagctggatctggctccttcacagatgtccgaacagctatttaccaaccccagacccacccccagcccgcaccgtacggccactgtgtcacagacagcggtgtggtctactctgtgggaatgcagtggctgaagtctcaaggagacaagcagatgctgtgcacttgcctgggcaatggcgtcagctgccaggagacagctgtgacccagacttacggtggcaactcaaacggggagccctgtgttctcccgtttcactacaacggtaggaccttctactcctgcaccaccgaagggcggcaagacggacatctgtggtgtagcacaacttcaaattatgaacaagaccagaagtattctttctgcacagaccacgcggttttggttcagactcgaggtgggaattccaatggtgccttgtgccacttccccttcctgtacagcaaccggaattacagcgactgtacttctgagggtaggcgggacaacatgaaatggtgcggcaccacccagaactacgatgccgatcagaagtttggattctgcccaatggctgcccatgaggagatctgcacgaccaacgaaggggtcatgtatcgcattggggaccagtgggataagcagcatgacctgggccacatgatgaggtgcacgtgtgttgggaacggccgtggacaatgggcctgcatcccctactcccagctccgagatcagtgcatcgttgatgacattacttacaacgtcaacgacacgttccacaagcgtcacgaggagggacatatgctgaactgtacctgcttcggtcagggccggggcagatggaaatgtgaccccatcgaccgatgccaagattcagagacccggacattttaccagattggtgactcctgggagaagtttgtgcatggtgtcagataccagtgttactgttacggccgtggcattggggagtggcactgccagcctctgcagacctacccaggcacaactggacctgttcaagtaattatcacggagacccccagccagcccaattcccaccccatccagtggaatgccccggagccttcacacatcaccaagtacattctcaggtggagacctaaaacctctacgggtcgctggaaggaagctaccattccaggccaccttaactcctataccatcaaaggcctgaccccaggtgtgatctacgagggacagctcatcagcatccagcagtacgggcaccaagaagtgactcgctttgacttcaccaccagcgccagcacacctgtgaccagcaacacagtgactggagagactgcgcccttttctcctgttgtggccacttccgaatctgtcactgaaatcacagccagcagcttcgtggtctcctgggtctcagcttccgacacggtgtcaggattccgagtggagtacgaactgagcgaggaaggagatgagcctcagtaccttgatcttccaagcacagccacttctgtgaacattcctgacctgctcccgggcagaaagtacatcgtcaacgtctatcagatatctgaagagggaaagcagagcttgatcctgtctacatcacagactacagcacctgatgcgcctccagaccctactgtggaccaggttgatgacacttccattgttgttcgatggagcagaccccaggcacctatcacagggtacaggattgtctattcaccttcagtagaaggcagtagcacagaactcaaccttcctgaaacggccaactccgtcaccctcagcgacctgcagcccggtgttcagtacaacatcactatctatgctgtggaggagaaccaggagagcacacccgttttcatccagcaggagactactggcgtcccacgatccgatgatgttcccgctccaaaggacctacagtttgtggaagtgaccgacgtgaaagtcaccatcatgtggacacctcctaatagcgcagtgactggataccgtgtggatgtcctgcctgtcaacctgccaggggaacatgggcagaggctgcctgtcaacaggaacacctttgctgaagtcaccggactgtccccaggggtcacgtacctcttcaaagtctttgctgtgcatcagggcagggaaagcaagcctctgacagcacaacagaccaccaaactcgatgctcccactaacctccagtttgtcaatgaaacggacagaacagttctggtaacttggactccacctcgagcccggatagcaggctaccgactgacagtgggcctcacccgaggaggccagcccaagcagtacaatgtgggacccatggcttccaagtatcccctgagaaatctgcagcctgggtctgagtacactgtgaccttgatggctgtgaaaggcaaccagcagagtcccaaagccaccggagtctttactaccctgcagcctctgcgctccattccaccttataacaccgaggtgacagagaccacaatcgtgatcacctggacccccgctccaaggattggcttcaagctgggtgtacgaccaagccagggaggtgaagcaccccgagaagtgacttcagactcaggaagcatcgttgtgtctggcttgactccaggcgtggaatacacgtacaccatccaagtcctgagggacggccaggagagagatgcaccaattgtcaaccgagtagtgacaccgctgtctcccccaaccaacttgcacctggaggccaatcctgacactggagtgcttaccgtctcctgggagaggagcaccaccccagatattactggctacagaataaccaccacccccacaaacgggcagcagggaaccgctttggaagaagtggttcatgccgatcagagttcctgcacttttgaaaaccgtaatcctggcctggagtacaatgtcagtgtttacactgtcaaagatgacaaggaaagtgcccctatctctgataccgtcatcccagaggtgccccagctcactgacctaagctttgttgatataactgactcaagcatcggcctgaggtggaccccgctaaactcttccaccattatcgggtaccgaatcacagtagttgcggcaggagaagggatccccatttttgaagattttgtggactcctcagtaggatactacacagttacagggctggaacccggcattgactatgacatcagcgttatcactctcattaatggcggagagagtgcccctactacactgacacagcaaacggccgtccctcctcccacggatctgcgattcaccaatatcggtccggacactatgcgggtcacttgggccccgcctccgtccattgagctaaccaacctcttggtgcgctactcacctgtgaagaacgaggaggatgtggcagagctgtccatttcaccctcagacaacgccgtggtcctaacaaatctcctgcctgggactgagtacctagtcagtgtctccagcgtgtacgaacagcatgagagcatacctctcagaggaagacagaaaacaggtctggactccccaactggttttgattcttctgatgtcaccgccaactcattcaccgtccactgggtggctcctcgggcccccatcaccggctacatcatccgccatcacgccgagcattctgccggaagacccaggcaagaccgagtgccgccctcaaggaattctatcaccctcaccaaccttaatccgggcacggagtacattgtcaccatcattgctgttaatggcagagaggagagccccccactgattggccagcaatccacggtttccgatgtcccgagagatctggaggtcatcgcttccacccccaccagcctgctcatcagttgggaaccccccgccgtctctgtgcgctattacagaatcacctatggagagacaggaggaaatagccctgtccaggaattcactgtgcccggaagcaagtccaccgccaccatcaacaacattaaaccaggagcagactacaccatcaccctgtatgctgtcactggccgtggggacagtccagccagcagcaagccagtttccatcaattatcaaacagaaattgacaagccatcccagatgcaggtgacggatgtccaggacaacagcatcagtgtcaggtggctgccttcaacttctcctgtgacaggttacagagtgaccaccgctcccaaaaatggcctaggaccaacaaaatctcaaactgtcagtccagatcaaacagaaatgaccattgaaggtttgcaacccaccgtggagtatgtggttagtgtctatgctcagaaccggaacggagaaagccagcccctggttcagactgcagtgaccaacattgaccgccctaaaggactggcattcactgatgtggatgtcgattccatcaaaattgcctgggaaagcccacaggggcaagtttccaggtacagggtgacctactcaagccctgaggatggaatccatgagcttttccctgcgcctgatggtgacgaggacacggcagagctgcacggcctcaggccgggttctgagtacacagtcagtgtggttgccttgcacggtggcatggagagccagcccctgattggagtccagtccacagccattcctgcgccaaccaatctgaagttcactcaggtgtcacccaccaccttgactgcccagtggacagcgcccagtgttaagctcactggctaccgagtgcgggtgaccccgaaggagaagacaggaccaatgaaagaaatcaacctttctccagacagcacctccgtgattgtgtcagggctcatggtggccaccaagtatgaagtcagcgtctatgctctcaaggacacattgacaagcagaccagctcagggagtcgtcacgactctggagaatgtcagccctccaagaagggcccgtgtgaccgacgctacagaaactaccatcactattagctggagaacgaagacagagacgatcactggcttccaagtcgatgccattccagccaatggccagaccccggttcagaggaccatcagcccggatgtcagaagctatactattacaggtttacagccaggcactgactacaagatccacctgtacacgctcaacgacaatgcccggagctctcctgtggtcattgatgcctccacggccattgatgccccatccaacctgcggttcctgaccaccacacccaactccttgctggtatcatggcaggcaccccgtgccaggattactggctacattatcaagtatgagaagcctggatcccctcccagagaagtggtccctcggccccgccctggtgtcacggaggccaccatcactggtctggagccaggaaccgagtacaccatctatgtcatcgcactgaagaacaatcagaagagtgagcccctgattgggaggaaaaagacagatgagcttccccaactggttacccttccacaccccaatcttcatggaccagagatcttggatgttccctccacagttcaaaagacccccttcgtcaccaaccctgggtatgacaccgaaaatggtattcagcttcctggcacatcccaccaacaacccagtgttgggcaacaaatgatctttgaggaacatggctttaggcgaaccacgccacccactgcggccacccccgtcaggcttaggccaagaccatacctgccgaatgtagatgaggaggtccaaatcggtcatgttcccaggggagacgtagactaccacctctatcctcatgttccggggctcaatccaaatgcctctacaggacaagaagctctctctcagacaaccatctcttggacgccattccaggagagttctgagtacatcatttcatgccaacctgttggcactgacgaagagcccttacagttccaagttcctggaacttctaccagtgcgactctgactggccttaccagaggggtcacctacaacatcatagtggaggccctgcacaaccagaggaggcacaaggtccgagaagaggttgttactgtaggcaacactgtcaacgaaggcctgaaccagcctacggatgactcatgctttgacccttacacggtttcccattacgccgttggagaggaatgggagcggttatctgactctggctttaagctcacttgccagtgcttgggctttggcagtggtcatttcagatgcgattcatctaaatggtgccatgacaacggtgtcaactacaagatcggagagaagtgggatcgtcagggagaaaatggccagcggatgagctgcacatgtctcgggaatggaaagggagaattcaaatgcgatccccatgaagcaacgtgttatgacgacgggaagacctaccacgtaggagaacagtggcagaaagagtatctcggagccatttgctcctgcacgtgtttcgggggccagcggggctggcgctgtgacaactgccgcagacctggggctgctgaacccagtcccgatggtaccactggccacacctacaaccagtatacacagagataccatcagagaacgaacactaatgtaaattgcccaattgaatgcttcatgccgttggacgtgcaggctgacagagatgattccagagagtaatctttccatccagcccaagccaacaagtgtctctctaccaaggtcaatccacaccccagtgatgttagcagaccctccatttctgagtggtcatttcacccttaagccttctgctctggagtcaagttctcagcttcagctcaacttacagcttctccaagcatcgccccgcgggatgttttgagacttccctcttaaatggtgacagttggtgccctgttctgcttcagggtattcagtactgctcagtattattgtctaagagaatcaaaagttcttgtgatttggtctgggatcaaagggaaacacaggtagccaaccacgatgcaatgaattgaatggtagtacccaagagcgggagcaggaagttaaaccagacagttctgctttcttttgccgtctgatctgcagcactgtcaggaggcctgtcctgtggctgtgtccaaacaccccacaggactcactgtcccaacaatcctaattgcctagaaatatctttctcttacctgttatttatcaatttttcccagtatttttatacggaaaaaattgtattgaagacactttgtatgcagttgataagaggaattcagtataattatggttggtgactatttttataatgtacatgccaacactttactactgtggaaagacaagtgttttaataaaaagatttacattccat

SEQ ID NO: 358 - DNA, 685 bp, Homo sapiens
acgagtgctgacatgatcactctctgtgttcacaggaaagcacatttgtcttggcgaaggcattgcccgaaatgaattgttcctcttcttcaccaccatcctccagaacttctctgtgtcaagccatttggctcccaaggacattgacctcacgcccaaggagagtggcattggaaaaatacctccaacgtaccagatctgcttctcagctcggtgatccggctgaggcagccatgtgccccagttctgttgggaatggcctcatgtttctgcctctgggggacctgctgaaaaccaggctccaaggccactgctccacatcttcctattgcagttctccaaagtcccaaggctttttcttattcctgtgaatggcactgaagaagtcaatcggctgtcttattttgacatgtgacagagatttcatgagtccacatctcatgctgagttacttccctcttcctcctaacagcccatgtccccagttatcagccctccatggtctgtgatctgtgctaatggactctgtatatggtctcagtgctatgtctacagacttacatagtatgtatggttcaggtaaacagaatcacagagtgtgtgagcttcggagtcttgtgcctttacttcacataatattattctaggttcctgtgttctacaggccacagtcacacacattcat

SEQ ID NO: 359 - DNA, 1320 bp, Homo sapiens
ccaaggtcctgcttttgcatcttaagccgcccctcctttctccaacagacacgaggagcaaagggtaactgagagggagtagcaggtaaagcccacagtgttctcaccgggtcaccctgaggacttcttagttataggagctgcttcattctctccgatccgtgctggcttctctcccactctcacttgaaggaaggggaaagctttctaagtttagccgtcactctggaatttaacatcatcgatgttctactgtgcagcgttgatggttcgatgggctctctccagggaggacggaaatccagatgccacttccttcttcatttacatagcattcatatcacgtcgcgactgacgctcaggaatgagtcatcctgtgtccctgcaggtggccgtgggcacacctgaggaagcaaagtccggcacgcagctggcagcagccatcgccgcaacataagctcccgaggaaggagtccagagacacagagagcaagatgagttccgagacaggccctgtagctgttgatcccactctgaggagaagaattgagccccacgagtttgaagtcttctttgacccccgggaacttcggaaagagacctgtctgctgtatgagatcaactggggaggaaggcacagcatctggcgacacacgagccaaaacaccaacaaacacgttgaagtcaatttcatagaaaaatttactacagaaagatacttttgtccaaacaccagatgctccattacctggttcctgtcctggagtccctgtggggagtgctccagggccattacagaatttttgagccgatacccccatgtaactctgtttatttatatagcacggctttatcaccacgcagatcctcgaaatcggcaaggactcagggaccttattagcagcggtgttactatccagatcatgacggagcaagagtctggctactgctggaggaattttgtcaactactccccttcgaatgaagctcattggccaaggtacccccatctgtgggtgaggctgtacgtactggaactctactgcatcattttaggacttccaccctgtttaaatattttaagaagaaaacaacctcaactcacgtttttcacgattgctcttcaaagctgccattaccaaaggctaccaccccacatcctgtgggccacagggttgaaatgacttctgggagttggggatggatgaaatgactccttgtatgtcttgacagcaagcattgattacccactaaagagcgactgccacaaggaaaaaaaaaaaaaaaaaaaaaaaaaaaaaaaaaaaaaaaaaaaaaaaa

SEQ ID NO: 360 - DNA, 4377 bp, Homo sapiens
agtcggtcgactccgagctcagtgaggacctaaagcagaggactgtggtgcggaggacagtgcttgctccggggagtgcagagcaataggtccccactcaagatggcagaggctcaccaagctgtggccttccagttcaccgtcacccccgatggcattgacctccgcctgagccacgaagccctcaaacagatctgcctgtcggggctgcactcctggaagaagaagttcatccggttcaagaatggcatcatcactggtgtgttccccgcgaatccgtccagctggcttatcgtggtggtgggtgtgatttcatccatgcatgccaaagtggacccctccctgggcatgatcgcaaagatcagtcggaccctagacaccactggccgcatgtcaagccagacgaagaacattgtgagcggcgtcctctttggtacagggctctgggtggcagtcatcatgaccatgcgctactcgctgaaggtgctgctctcctaccacggctggatgtttgcagaacacggcaaaatgagccgcagcaccaagatctggatggctatggtcaaggtcctctcaggtcggaagcccatgttgtacagcttccagacgtctctgccacgcctgcctgtcccagctgtcaaagatactgtgagcaggtacctggaatctgtaaggccactgatgaaggaagaagacttccagcgcatgacagcactggcccaggattttgctgtcaacctcggacccaaattgcagtggtatttgaagctaaaatcctggtgggccacaaattacgtgagtgactggtgggaagaatatatctacctgcggggccgagggccgctcatggtcaacagcaactactacgccatggagatgctgtacatcaccccaacccatatccaggcagcgagagctggcaacaccatccacgccatactgctgtatcgtcgcacattagaccgtgaggaactcaaacccattcgtcttctgggatccaccattccactctgctcagcccagtgggagcgactcttcaatacttcccggatccctggggaggagacagacaccatccaacatatcaaggacagcaggcacattgttgtgtaccacagagggcggtacttcaaggtctggctctaccacgatgggaggctgctgaggccccgagagctggagcagcagatgcagcagatcctggatgatccctcagagccacagcctggggaggccaagctggccgccctcactgctgcagacagagtgccctgggcaaagtgtcggcagacctattttgcacgagggaaaaataagcagtccctggatgcggtggaaaaggcagcgttcttcgtgacgttggacgaatcggagcagggatacagagaggaggatcctgaggcatccatcgacagctacgccaaatccctgctgcatggaagatgctttgacaggtggtttgacaagtccatcacctttgttgtcttcaaaaacagcaagataggcataaatgcagagcactcctgggcggacgcgcccatcgtgggccatttgtgggagtatgtcatggccaccgacgtcttccagctgggttactcagaggatggacactgtaaaggagacaccaaccccaacatccctaagcccacaaggctacaatgggacattccaggagagtgccaggaggtcatagatgcatccctgagcagcgccagtcttttggcaaatgatgtggacctgcattccttcccatttgactctttcggcaaaggcttgatcaagaagtgccggacgagtcccgatgccttcatccagctggcgctgcagctcgcacattacaaggacatgggcaagttctgcctcacatatgaggcctccatgacccggctcttccgagaagggaggacagagactgtacgctcctgcactatggagtcctgcaactttgtgcaggccatgatggaccccaagtcaacggcagagcagaggctcaagctgttcaagatagcttgtgagaagcaccagcacctgtaccgcctcgccatgacgggcgccggcatcgaccgccatctcttctgcctctatgtggtgtccaagtatcttgcagtcgactcacctttcctgaaggaggtattgtctgagccatggaggttgtctacgagccagactcctcagcagcaggtggagctctttgactttgagaaaaaccctgactatgtgtcctgtggagggggctttgggccggttgccgatgacggctatggtgtctcctacattatagtgggagagaatttcatccacttccatatttcttccaagttctctagccctgagacagactcacaccgctttgggaagcacttgagacaagccatgatggacattatcaccttgtttggcctcaccatcaattctaaaaagtaaacccctgagccacacggaaggaaaacggaccctcgtgatacaaaccaaatgaatagatgttgctcctgaccataggacaggcagaaaattgctcttataaaactcagttttccttccagaaggtttaccgtcagtctccctagaacaacagtaggcttcacgtgtgaattgtgaccctactacatccagagatgccttggctccaggaatattgggcacagtcccctgatgtcttttgaatcggctcctactggataaagggatttaaatgctggtgaattcctggattctgggggttgtttcttcacatgtgttggaggtgacagacttcctcagtggtgaccctgtgaatacttgggcgtctgactccacccaggcagtgtgagcatcaccttgtggaaagagaaagtgtcttcagagccagcagaggcaacagctgtagctaacacatctgtaacacactaatggaatggttaggcctggggattaaggttctgctatgagtgacagccactgtccctttggaagttcacatttccaggaagcagagtaccacctccccagtgccaccttcctcacacatcttcaaaacccagtgccttaaagaaggggcccattggcaagcgggaccatagagaagacttagcatctgtgaagcctttgggtggatatgtgaggatgctgcttccccttactggttcctgcataaagatgtccctaagtaagcacttcccccacccctagaaaatgaggtccttggtgaaggcagggatgctggagtctcattgcctgccagttccattaagccacaaaatagcagacatgtgtccacagagggaggggcttggtagtcaaaggctgcatagctggacaacagcgggagagtgtggcttgctgtatttgacagctgttggcaagaggagtgagaccctggtcaccaagtcagacatactgacacaggcagccaaagctcacggagccaggagatatagatagatactggcttgtattctggcagatacacccctgggcttatcttctaatcccacccagtcagattccaaccagagtcaaattccatagaaggctaggtcattttggcgacagactcagggatctcaagtaatgggtgcttttacccacatgccatccctcagtgggagtgcctttcttgaaagcatccaatgggctaaagcagctctaccaagtctgtttggtatttaatgtaaacattagcattaatggagtggtctctcctacctgtcaccatcctgtcctgacaagcttagctctccgaggtttacatcatgtatttattttccagtgcccctttggccttgtttgattcctgcccctgtgccagaagtggcccagaagtgaggggtggggtgaccagcagtgcagagaggtgctggctgaacagttcatgtgtgtcttatgggtatacatgtataaattttgtaatgtaaaaaaaaaaatcatacctaaaagggccaaagttttttttttttttactaaaaccaagaaaacaaaagacaacataaagacataagcagaaacaaactgttgtaagtcagagcggcctgactctcgctgctgtgaccactcaccaacctgtgttactcagagtagcccggctagtgcccgagtgggacattcctctctcaggtttccagtgtccttgctgctcctgagcagttaccaatgcaatttcgcattccttacaaggcagaagagtgggctctcactgtatgtgttcaaaggaggaggtaagactattgtgtatttaatttaatgtggaacaaaatatagtcttaccgcagccaaggttcaaatttggtgttctaatctgtccattgcatgtaaataccatatctgtttggatataaatcttagaagtgcatgtgtgagcgaatgtagctggccattaataaaacattaatactgtctact

SEQ ID NO: 361 - DNA, 643 bp, Homo sapiens
aaagggcagcggttcctcttggtgattgtatcgcgccctcttgctgctaattaccgcgttctccattcctccacatgctgtctctagactttctagatgatgtacggcgaatgaacaagaggcagctgtactaccaagtcctaaattttggaatgattgtctcctcggcactaatgatctggaaggggctgatgttgataaccggaagtgagagtccaattgtagtggtgctcagtggcagcatggagcctgcgtttcacagaggggatctccttttcctcacgaaccgagttgaagatcctatacgtgtgggggaaatcgttgttttcaggatagaaggaagagagattcccatagtgcatcgagtcttgaagatccatgaaaagcaagatgggcatatcaagtttttaaccaaaggagataataatgccgttgatgaccgaggcctctataaacaaggacaacactggctggagaagaaagatgttgtagggagagcaagagggtttgttccgtacattggaatcgtgacgatcctcatgaatgactatcctaaatttagttatgcagtactgtttctgctgggtttatttgtgctggtccatcgtgagtaagaagccggcctcgctggtcctgggaggct

SEQ ID NO: 362 - DNA, 643 bp, Homo sapiens; identical to SEQ ID NO: 361

SEQ ID NO: 363 - DNA, 242 bp, Homo sapiens
tcctgtcactcatgtggacctcagataagagcacagatactctcgacctcttacatttggagagttttgagcagacaggaagaagacggagcctgggagcagctgttctccaatagtcaaattaagactgttcctctctgagctctgtacttcaaccagcacctttaggcagaagccatcaaatcagaaatgtctgttaataattaaagtctatgattgccaccaaaaaaaaaaaaaaaaaa

SEQ ID NO: 364 - DNA, 893 bp, Homo sapiens
tccccgctgagttcatcaccagggacaggtgacctgagctgcccctggagcccagctcccatttccttctggttctggccgatctcttcgttatgagctggctgctgggttacgtggaccccacagagcccagctttgtggcggctgtgctcaccattgtgttcaatccactcttctggaatgtggtagcaaggtgggagcagagaactcgcaagctgagcagagccttcgggtccccttacctagcctgctattccctgggcagcatcatcctgcttctgaacatcctccgctcccactgcttcacacaggccatgatgagccagcccaagatggagggcctggatagccacaccatctacttcctgggccttgcactcctgggctggggactcgtgtttgtgctctccagcttctatgcactggggttcactgggacctttctaggtgactactttgggatcctcaaggagtccagagtgaccacatttcccttcagcgtgctggacaaccccatgtactggggaagtacagccaactacctaggctgggcacttatgcacgccagccctacaggcctgctgttgacggtgctggtggcactcgtctacgtggttgctctcctgtttgaagagcccttcactgcggagatctaccggcggaaagccaccaggttgcacaaaaggagctgacagggccatgagggacctttggaaagccggattgcctcccggctgacccaagcaacaacccttctcggggagagcagcgctggccattgtacctgtgccttggaaaccagtcatgggggtgctcaggcattatgtcatgtgactgctgagacccccatccccaccaatccctgacacactaataaaggctttgtgacctcc

SEQ ID NO: 365 - DNA, 1356 bp, Homo sapiens
cccggagctgtcgatcggggacaaagcgcggccgcccgcgccccccgagccgcccgagccggggccagccccccgcgactgacatgatgtttccgcaaagccggcactcgggctcctcccacctcccccagcagctcaagttcaccacctccgactcctgcgaccgcatcaaggatgagttccagctgctacaagcgcagtaccacagcctgaagctggagtgtgacaagctggccagcgagaagtcagagatgcaaaggcattacgtcatgtactatgagatgtcttacggattgaacatcgagatgcacaaacaggctgaaattgtgaagaggctgaatgggatttgcgcccaggttctaccctatttgtcccaggagcatcagcagcaggtcctgggagctatcgagagagccaagcaggtcacggctcccgagctgaactccatcatccgacagcagctccaggctcaccagctgtcccagctccaggcgctggccctgcccctgacaccgctgcctgtcgggctccagccgccatccctccctgcggtcagcgcaggcacaggcctgctgtcactctctgctctgggctctcagacccacctctccaaggaggacaagaacggacacgatggggacacccaccaggaggatgatggagagaagtccgattagctcctggggagagggagggggaggggggataccaggggagacaggcacagagagcacagtgttctgagggccacactgcacacagctcggtccctacccaagcttccacctccagtcctggttccagctgtgcaccctgggcctaggagacgccagagggacagcccaggctacagggaaaattccccaccttcaacatttccccgggctacagccaccaatctcggcccagaatgtacacaacgctagccgcccctttccaccctgtgcaccccgaatttgccccctttccccttctctgcttcctgcactgcacacctgctaggcccagacccctccccccagctcacccagctctggttccctcaaccgcggaaagaaagcattggctcgggactgcagtgggggtgggcaccccacaaacttccctctccccttccccaaataaacgtgagggttaaaagtcggtttgtttattatttctttttcgtcccagtactctatagctaccatctaagagagaaaaagaaggaagccctggagcgagcgagggtctgtctgtgcatatagttagatttttctggtcgcctcgctttgcaccgagaggtggagggccgctgtactgagggtggggtctagctgtgccttcaaaataaaaacatgaaaaggtcaaaaaaaa

SEQ ID NO: 366 - DNA, 1356 bp, Homo sapiens; identical to SEQ ID NO: 365

SEQ ID NO: 367 - DNA, 3115 bp, Homo sapiens
gaattccggtccgcagcctaggggcggggcgcggacgacggagccatggattgcacatttgaagacatgcttcagctcatcaacaaccaagacagtgacttccctggcctatttgatgccccctatgctgggggtgagacaggagacacaggccccagcagccctggtgccagctctcctgagagcttctcttctcctgcttctctgggctcctctctggaagccttcctgggaggacccaaggtgacacctgcacccttgtcccctccaccatcggcacccactgctgtaaagatgtacccgtccgtgccccccttctcccctgggcctggaatcaaagaggagccagtgccactcaccatcctgcagcccccagcaccacagccatcgccagggaccctgttgcctccgagcttccctcctccacctgtgcagctcagccctgctcctgtgctggggtactcaagcctgccttccggcttctcaggaacccttcctgggaacacccagcagacgccatctagcctgccactgggctccacgccaggaatctcgcccacccccttacacacccaggtccagagctcggccgcccagcagccgccgccagcctcagcagcccctagaatgagcactgtggcctcacagatccagcaggtccccgttgtactgcagccacacttcatcaaggcagactcgctgctgctgacagctgtaaagacagacacaggagccacaatgaagaccgcaggcatcaacaccctggctcctgcgacagccgtgcaggcaggccccttgcagaccctggtgagtggagggaccatcctggccacagtcccactggtggtggacacagacaaactgcccatccaccgactagcagctggtggcaaggccctgggctcagctcagagccgtggtgagaagcgcacagcccacaatgccattgagaagcgctaccgttcctctatcaatgacaagattgtggagctcaaggacctggtggtgggcactgaggcaaagctgaataaatctgctgtcttgcgcaaggccatcgactacatccgcttcttacagcacagcaaccagaaactcaagcaggagaacctgaccctgcgaagtgctcacaaaagcaaatcactgaaagacctggtgtcagcttgtggcagtggaggaggcacagatgtgtctatggagggcatgaaacctgaagtggtagaaacgctgacccctccaccctcagacgccggctcaccctcccagagtagccccttgtccttgggcagcagaggcagcagcagtggtggcagtgactctgagcccgacagcccagcctttgaggataaccaggtgaaagcccagcggctgccttcacatagccgaggcatgctggacccgtcccgcctggccctgtgtgtactggtcttcctgtgtctgacctgcaacccattggcctcactgtttggctggggcatcctcactccctctgatgcttcgggtgtgcaccgtagttctgggcgcagcatgctggaggccgagagcagagatggctctaattggacccagtggttgctgccacccctagtctggctggccaatggactactagtgttggcctgcttggctcttctctttgtctacggggaacctgtgaccaggccacactccggcccggctgtacacttctggagacatcgcaaacaagctgacctggatttggcccggggagattttgcccaggccgctcaacagctgtggctggccttgcaagccctgggccggcccctgcccacctcaaacctggatctggcctgcagcctgctttggaacctcgtccgccacctgctgcagcgtctttgggtgggccgctggctggcaggccaggctgggggcctgcagagggactacaggctgagaaaggatgctcgtgccagtgcccgagatgcggctgtcgtctaccataagctgcaccagctgcatgccatgggcaagtacacaggaggccatcttgttgcttctaacctggcactgagtgcccttaacctggctgagtgtgcaggagatgctatatccatggcaacactggcagagatctacgtggcagctgccctaagggtcaaaaccagcctccccagagccttgcacttcttgacacgtttcttcctaagtagtgcccgccaggcctgcctggcacagagtggtgcagtgcctcttgccatgcagtggctctgccaccctgtaggtcaccgtttcttcgtggatggggactgggctgtacacggtgccccccaggagagtctgtacagcgtggctgggaacccagtggatccactggcccaggtgacccgactattctgtgaacatctcctggagcgagcattgaactgtatcgctcagcccagcccaggggcagctgatggacacagggagttctcagatgcccttggatatctacagttgctaaatagctgttctgacgctgtcggagctcctgcgtgcagcttctctgtcagttccagcatggctaccaccactggcacagacccagtggccaagtggtgggcctcactgacagccgtggtgatccactggctgaggcgggatgaggaggcagctgaacgcttatacccactggtagagcacattccccaagtgctgcaggaaactgagagacccttcccagggcagctctgtactccttcaaggctgcccgggctctgctggaccacagaaaggtggaatccagcccagccagcctggccatctgtgagaaggccagtgggtactgcgggacagcttagcctctacatcaactgccagttccattgacaaggccgatgcagctgctcctgtgtgatctacttcttgtggcccgcaccagcctatgcggcgccaacagtcagcagcttcagcccagggagctcacggtaccagcaatggaccccaggcctctgctctggagctgcgtggtttccaacatgacctgagcagcctgaggcgcttggcacagagcttcggcctgctatgaggagggtcttcctacatgaggccacagctcggctgatggcaggagcaagtcctgcccggacacaccagctcctggaccgcggaattc

SEQ ID NO: 368 - DNA, 1058 bp, Homo sapiens
cattaaaatgtggcttagatcttacaggataacgttttcctgtttgaccagactaaaaacttacaggtcctcttggaagaaattatacagtacttcacaaacagttgacagcaaggaggtcaaaaccttccaggccctggctcactcatggtgggatgagcaagggaagtttgcgcctcttcattctatgaatgacctacgggtgccgttcattagagacaatcttttgaaaacaagtactaatcatgatccaggaaagcctttatctgggatgaagattctcgacgttggctgtggcggtgggttattaactgaacctctagggagactgggagcttcagttgttggaatcgatcctgtggctgaaaacattaagatagcacagcaccataaatcatttgatccagtcctggataagaggatacagtaccgagtgtgctccctggaggagaccttgaatgagaatgcagagtgttttgatgctgtcgtggcttctgaagtggtcgagcatgtgaacaaccttgaaatgttcatacagtgctgctatcaagtattgaaacctggtggctctttattcattactacagtgaacaaaacacagctgtcctatgtcttgggaattgttttctcagagcaaattgcaggcattgttccaaaaggcactcatacgtgggagaagtttgtttcacctgaaaagctagaaagcatcttggaaccaaatggtctgtcagttgaaactgtggcaggaatggtctataaccctttctcaggttactggcattggactgaaaataccagccttaactatgcagcccatgctgtgagagccagggctcaggaacacctggagcctgctgagtctgcttgaaagggggaagcagaagcaccccatgccaaagtctccggcagcccaagtgtgcacgaggggcagagaaaatgagaaagctctgaggacagcagtaaatatgcttgaagttgtgttgtttacaaatccaaacatcttactccttttcgggagggattctgaagaacaaaaggtcaataaaaatatctaaatc

SEQ ID NO: 369 - DNA, 911 bp, Homo sapiens
atgcgggaccggctgccggacctcacggcgtgtaggaaaagcgacgatggagacaatgctgtcatcatcacggtggagaaggaccacttcatggatgccttcttccatcaggtggaggagattcgaagcagcatagccaggattgctcagcacgtggaggatgtgaagaagaaccacagcatcatcctctctgccccaaacccagaaggaaaaataaaagaagagctggaggacctgaacaaagagatcaagaaaactgctaacaggatccggggcaagctgaaggctattgagcagagttgtgatcaggacgagaatgggaaccgaacttcagtggatctgcggatacgaaggacccagcactcagtgctgtcacggaagtttgtggacgtcatgacagaatacaatgaagcacagatcctgtttcgggagcgaagcaaaggccgaatccagcgccagctagagatcactgggaggaccaccactgacgaggagctggaggagatgctggagagcgggaagccgtccatcttcatctcggacattatatcagattcacagattactaggcaagctctcaatgagatcgagtcacgccacaaagacatcatgaagctggagaccagcatccgagagctgcacgagatgttcatggatatggccatgtttgtcgagactcagggtgaaatggtcaacaacattgagagaaacgtggtgaactccgtagattacgtggagcacgccaaggaagagactaagaaagccatcaaataccagagcaaggccagacggaaaaagtggataattgctgctgtggtggtggctgtcattgctgtcctggctctaatcattggcttgacggttggcaaatgattgcgtagatggcgctgggtgcttgcctctccctcagg

SEQ ID NO: 370 - DNA, 2040 bp, Homo sapiens
ttactgaattcggatgcagagcatcagaggcccagctagagggacaacacagaggagtaatttgctgacagacctgcagggatggacctgctttcagctctcacactggaaacctgggtcctcctggcagtcgtcctggtgctcctctacggatttgggacccgcacacatggacttttcaagaaacaggggattcctgggcccaaacctctgcctttttttggcactgtgctgaattactatatgggtttatggaaattcgatgtggagtgccataaaaagtatggaaaaatatgggggttgtttgatggtcaaatgcctctgtttgccatcacggacacagaaatgatcaagaatgtgctagtgaaggaatgcttttctgtcttcacaaaccggcgggattttggcccagtggggattatggggaaagctgtctctgtagctaaggatgaggagtggaagagatatagagccttgctgtcccccacgttcaccagtggaagactcaaggagatgttccccatcattgaacagtatggagacattttggtaaagtacttgaagcaagaggcggagacaggcaagcctgtcaccatgaaaaaagtgtttggtgcctacagcatggatgtgatcaccagcacatcatttggagtgaacgtcgattcccttaacaacccaaaggatccttttgtggagaaaaccaagaaattgttaagatttgacttttttgatccgttgttcttgtcagtagtactctttccattcctcaccccaatatatgagatgttaaacatctgcatgttcccaaaagattcaatagaatttttcaaaaaatttgtgtacagaatgaaggaaacccgcctggattctgtgcagaagcatcgagtggattttcttcagctgatgatgaatgctcataatgattctaaagacaaagaatctcatacagccctatccgatatggagatcacagcccagtcaatcatttttatttttgctggatatgaacccaccagcagcacactttcctttgtcctgcattccctggccactcacccagatacacagaagaaactgcaggaggagatcgacagggctctgcccaataaggcacctcccacctatgatactgtgatggaaatggaatacctggatatggtgttgaatgaaaccctcagattgtatccaattggtaatagacttgagagagtctgtaaaaaagatgttgaaatcaatggtgtgtttatgcccaaagggtcagtggtcatgattccatcttatgctcttcaccgtgatccacagcactggccagagcctgaggaatttcgcccagaaaggttcagcaaggagaacaagggcagcattgatccttatgtatatctgccctttggaaatggacccaggaactgcattggcatgaggtttgctctcatgaatatgaaactcgctctcactaaagttctgcaaaacttctccttccagccttgtaaggaaacacagatacctctgaaattaagcagacaaggacttcttcaaccaacaaaacccattattctaaaggttgtgccacgggatgaaatcataactggatcatgattttccctcaaggagttctgctgaattcttcagaaatgtggtgtctaagaacaccagaccctttaatttatgtcatgaataaaattcagatgaaattagggcttaatcgactttgttttgattcggtacatctttgatctttctcagtgtctacaatgtacccatctaatataaaggaaatgacaagtcagtgacagaacaggaacttaacctttggtgattctcacgggactacctccatccacatctggttgtctctgttaatttcttttgatagtaaccttgtctctgtgtaatttgatcaagaactttttcatgaaaatgtgaactattgtgacaactttaattgtagatttggtatcagatgttttagatgcattattctacactaaatgttacatggaaaaaatgtgaataaacacttctttaaaaatccccaggggc

SEQ ID NO: 371 - DNA, 2040 bp, Homo sapiens; identical to SEQ ID NO: 370

SEQ ID NO: 372 - DNA, 1464 bp, Homo sapiens
atgcatcccttctacactcgggccgccaccatgataggcgagatcgccgccgcggtgtccttcatctccaagttcctccgcaccaaggggctcacgagcgagcgacagctgcagactttcagccagagcctgcaggaactgctggcagagcattacaaacatcactggttcccagaaaagccgtgcaagggatcaggttaccgttgtattcgcatcaaccataagatggatcctctgattggacaggcagcccagcggattggactgagcagtcaagagttgttcaggcttctcccaagtgaactcacactctgggttgacccctacgaagtgtcctacaggattggagaggatggctccatctgtgtgctgtatgaagcctcaccagcgggaggtagctctcaaaacagcaccaacgtgcaaatggtagacagcagaatcagctgtaaggaggaacttctcttgggcagaacaagcccttccaaaaactacaatatgatgactgtatcaggttaagatatagtctatggatggatcatcttataatggatggatagatttgattttttgctttgggtgggctcctcttggggatggattatggaataaccatgtcacagctgtgaagatctggcacaagatagagtggtaataatttttttttttaaagtgacagtgccatagtttggacagtacctttaagtgatttaagtagcctgtgagtccaagtaaaggatcactttatttggtagggagtgaagtcgcagggtggtttcagtttctcccagaccttatacccaatttgtcacaccagtccctttaaggaaattctgtatttcaaagaaccctcttttgcagtcagtcaaccttgcaggggaatttgcactatttacacttgaaagttaccagtaacttttttttggcagctcaataggaaagctcaatgttctaagcatggtagtactggaaatattacacggagacttttacctagcacttaaaaatgtataaatgtacataaagacacttagtacgcatgacctgggggaaatggtcagaccttgtgtttttggctttgagagtagcaagtgaccggaatctgccatgacaacaggcttttaaaagacccttacaaagacactgtctcaactgtggttagcaccagccagctctctgtacattcgcttgtagttttctaagattgagtgagtaaacttcttatttttagaaagtggaggtctggtttgtaactttccttgtactcaattgggtaagagtctttttccacaaaccgccatctattttgtgaactttgttagtcatcttttatttggtaaattatgaactggtgtaaatttgtacagttcatgtatattgattgtggcaaagttgtacagatttctatattttggatgagaaatttttcttctctctataataaattgtttcttatcttggcatttt

SEQ ID NO: 373 - DNA, 1464 bp, Homo sapiens; identical to SEQ ID NO: 372

SEQ ID NO: 374 - DNA, 4269 bp, Homo sapiens; identical to SEQ ID NO: 347

SEQ ID NO: 375 - DNA, 2622 bp, Homo sapiens
cacctctgcgtattcacggaatggggaaatgccaagagccttccagtacgatttggtgtccagttctaccctgtacaccccttccgtgaacttctcatctgtggtgagcccgtgcagctctccagactcggcggtcttcccagaggcaaacggctcccagcttccgtctgcagtctttttgaacactttcacggtcacagtcctcactcacccacggagcatccaggatgaagtctgcgactgggcctctgcttcctacattgctggggctactgctcctgtctataccaaggactcagggtgtcaaccccgccatggtggtcaggatcaccgacaagggcctggagtacgcggccaaggaggggctgttgagtctgcagagagagctgtacaagatcacactgcctgacttcagcggggacttcaagatcaaggctgtgggccgtggacagtacgagtttcatagcctggagatccagagctgtcagctgcgtggctcgtccctgaagccgctcccaggccgaggcctgagtctctccatctctgactcttcgatcagcgtccggggcaaatggaaagtgcgcagatccttcgtgaaacttcacggctcctttgacctggatgtcaaaagtgtcactatttcagtggacctcctcctgggcgtggatccctcagaacggcccacagtcaccgcctctggatgcagcaaccgcattcgtgatttggaattgcacgtatcaggaaatgtggggtggctgctgaatcttttccacaaccagatcgagtccaagctccagaaagtattggaaagtaagatttgtgagatgatccagaagtctgtgacctctgatctgcagccttatctccaaactctgccagtcacagcggatatcgacactatcctgggcattgactacagtttggtggcggctccccaagcaaaggcccagacgctggatgtgatgtttaagggtgaaatttttaatcggaatcaccgctccccagtcactacccccaccccgaccatgagcctacctgaggacagtaaacaaatggtctactttgccatctcagatcaggccttcaacatagccacccgggtttaccaccaggccgggtacctgaactttaccatcacagatgacatgttaccgcctgactccaacatccggctgaacaccaaggccttccgccccttcactcctctgataaccagaaagtaccccgacatgaacttggagcttcttggaacagtggtctctgccccacttctgaatgtcagtcctgggaatctgtccttggccccacagatggagattgaaggctttgtgatcctgcccagctccgcccgcgaatctgtcttccggcttggcgtggtcacgaatgtattcgtctcattaacttttgacaacagcaaggtcaccgggatgctgcatccagagaaggcgcaagtgagactgatcgaatccaaagtcggcatgttcaatgtgaacctgttccaggcattcctcaactactaccttctcaacagcctctaccctgatgtcaacgatgagctggccaagggcttccccctccctctaccaaggcgtattaagctccacgacctcgacttccagatccacaagaacttcctatacttgggtgccaatgtccagtacatgagagtctgaggacaagaagaaagatgggcctcagaggccacagcgggacctgccatttgtaattccagatgcgtagcacatctccagagagtctcaaaatacaaagaagtttctgttcctggctctggtggatcctgtccccacagtcctcttcgccaggtgcaccctcagcctggacttgactctgacctctccagggagaagccctcccctcaccaacctctccagggagagcccctccccccaccaacctctccagggagacccctctcccaccactgacctggaatcacttaaagagcaggcactgtggttttgagtgcaccttctcaccttcatgtctgacggagtgctggcacttagtaggtcctcaataaatatttatagaatgacatgacagcccagctgaacctctttattgctagaccatctggtctgagccagccttagatgctctgtcagagctgttatctccaaggctagaccaccttttcactcttgttggcctctgctatgagggcctcaacaagggagtgaatgactacacacacacacacacacacacgcgcacacacacacacacgcacgcacgcacgcacgcacacgcatgcacatgcatacactcacgcacgtgcacgcacacaccactcccttcaccagcacgtgtctaggcttctagccttattcccacagatacctcctccttgcctcctgcttgctgcagacaacagacccagaaggaaagcaaaattgtagccccccgaggctgtccccatggaggtctgtgcaagtgagaaagagatggagccaaggaaggttttggttggacccaaatcaaacgctcatcggactgttgttcacgagccacatgcctgcgaggagagaccatgatttctaactaccgaacaataagcctttgatcagacttaataaagagtcatttccgtgttatgtaaaa

SEQ ID NO: 376 - DNA, 3700 bp, Homo sapiens; identical to SEQ ID NO: 24

SEQ ID NO: 377 - DNA, 5099 bp, Homo sapiens
cccttgtgacaggtcagtcttacgagaatatggtaactgagatcatgtcaatgggctatgaacgagaacaagtaattgcagccctgagagccagcttcaacaaccctgatagagctgtggaatatcttctaatgggaatccctggagactgaggagttccagtactcacagcctgtggaggaggatcaaccacggcctgactttcgcggccgccgcgggaggcgcgcggagccggagccgagcccgtgcgcgcgccaccatgcctttggccttctgcggcaccgagaaccactcggccgcctaccgggtggaccaaggcgtcctcaacaacggctgcttcgtggacgcgctcaatgtggtgccacatgtctttctgctcttcatcaccttccccatcctcttcatcggatggggcagccagagctccaaggtgcacattcaccacagcacctggctccatttcccggggcacaacctgcgctggatcctgaccttcatactgctcttcgtcctcgtgtgtgagatcgctgagggtatcctgtctgacggggtgacagaatcccgccacctccacttatacatgccagctgggatggcattcatggctgccatcacctctgtggtctactaccataacattgagacctctaactttcccaagctgctgattgctctgctcatctactggaccctggccttcatcacgaagaccatcaagttcgtcaagttctacgaccacgccattggcttctctcagctgcgcttctgcctcacggggcttctggtgatcctctacgggatgctgctgcttgtggaggtcaatgtcatccgggtgaggagatacgtcttcttcaagacaccaagggaagtaaagccccccgaggacctacaggacctgggtgtgcgctttctgcagcccttcgttaacctgctatcaaaggggacctactggtggatgaatgccttcatcaagactgctcacaagaagcccatcgacctgcgggccatcgggaagctgcccattgccatgagagccctcaccaactaccagcgactctgcttggccttcgatgcccaggcgcggaaggacacacagagccagcagggtgcccgggccatctggagggctctctgtcatgcctttgggagacggctggtcctcagcagcacattccgtatcctggccgacctcctgggctttgctgggccactctgcatcttcgggatcgtggaccacctcgggaaggagaaccacgtcttccagcccaagacacagtttcttggagtttactttgtctcatcccaagagttcctcggcaatgcctatgtcttggctgttcttctgttccttgccctcctgctgcaaaggacctttctacaagcctcgtactacgttgccattgaaactgggatcaacctgagaggagcaatccagaccaagatttacaataagatcatgcacttgtctacttccaacctgtccatgggggaaatgactgctgggcagatctgcaacctggtggccatcgacaccaaccagctcatgtggtttttcttcttatgcccaaacctctgggctatgccggtacagatcattgtgggcgtgatcctcctctactacatccttggggtcagcgccttgattggagcggctgtcatcattctgctggctcctgtacagtactttgtggccaccaagctgtcccaggcacagcggacgaccctggaatattccaatgagaggctgaagcagaccaatgagatgctccggggcatcaagttgctcaagctctatgcgtgggagaacatcttctgctccagggtggagaagacacgcaggaaggaaatgaccagcctcagggccttcgctgtctacacctccatctccatcttcatgaacacagctatccccatcgctgctgtcctcatcaccttcgtgggccacgtcagcttcttcaaagagtcggacttctcgccctcggtggcctttgcctctctctctctcttccacatcctggtcacaccgctgttcctgctgtctagtgtggttcggtccactgtcaaggccctggtgagcgtgcaaaagctgagtgagttcctgtccagtgcagagatccgtgaggaacagtgtgccccccgagagcccgcaccccaaggccaagcgggcaagtaccaggcggtgcccctcaaggtcgtaaaccgcaagcgcccagcccgagaagaagtccgggacctcttgggcccactgcagaggctgactcccagcacggatggagacgctgacaacttctgtgtccagatcatcggaggcttcttcacctggacccctgatggaatccccaccctgtccaacatcaccatccgtatcccccgaggtcagctgaccatgatcgtggggcaggtgggctgtggcaagtcctcgctccttctggccaccctgggggagatgcagaaggtctctggagctgtcttctggaacagccttccagacagcgagggagaagaccccagcaacccagagcgggagacagcggccgattcggatgccaggagcagaggccctgtggcttacgcatctcagaaaccatggctgctaaatgccactgtggaggagaacatcaccttcgagagtcccttcaataagcaacggtacaagatggtcatcgaagcctgctccctgcagccagacatagacatcctgccccatggagaccagactcagattggggaacggggcatcaacttgtctggtggtcagcgtccagggatcagtgtagcccgagccctctaccagcacaccaatgttgtctttttggatgaccctttctcggctctggatgtccatctgagtgaccacctaatgcaggctggcatcctcgagctgctccgggatgacaagaggacagtggtcttggtgacccacaagctacagtacctgcctcatgctgactggatcattgctatgaaggatggcaccattcagagggaggggacactcaaggacttccagaggtctgagtgccagctctttgagcattggaagaccctcatgaaccggcaggaccaagagctggagaaggagacagtcatggagagaaaagccccagagccatctcagggcctgccccgtgccatgtcctcaagagatggccttctgctggatgaggatgaggaggaagaggaggcagccgagagcgaggaagatgacaacttatcctctgtgctgcatcagcgagccaagatcccatggcgagcctgcaccaagtatttgtcctctgctggcatcctgctcctgtccctgcttgtcttctcccagctgctcaagcacatggtcttggtggccattgactactggctggccaagtggacggacagtgccctggtcctgagccccgccgccaggaactgctccctcagccaggaatgtgccctggaccaatctgtctatgccatggtattcaccgtgctctgcagcctgggtatcgcgctgtgccttgtcacctctgtcactgtggagtggacgggactgaaggtggccaagaggctgcatcgcagcctgctcaaccgtatcatcctggctcccatgaggttctttgagaccacgcccctggggagtatcctgaacagattttcatctgactgtaacaccattgaccagcatatcccgtccacgctggagtgcctgagcagatccaccttactctgtgtctccgccctggctgtcatctcctacgtcacgcctgtgttcctagtggccctcttacccctcgccgtcgtgtgctacttcatccagaagtacttccgagtggcgtccagggacctgcagcagctggacgacacaacacagctccctctgctctcacactttgctgaaactgtggaaggactcaccaccatccgtgccttcaggtacgaggcccggttccagcagaagctcctagagtacaccgactccaacaacattgcctctctcttcctcacagcagccaacaggtggctggaagtccgcatggagtacatcggagcatgcgtggtactcatcgccgctgccacctccatctccaactccctacacagggagctctcagccggcctagtaggcctgggcctcacctatgccttgatggtctccaactacctcaactggatggtgaggaacctggcagacatggagatccaactgggagctgtgaagggtatccacacactcctgaaaactgaggcagagagctatgaggggctcctggcaccatcgctgatccccaagaactggccagaccaagggaagatccaaattcaaaacctgagtgtacgctatgacagctccctgaagcccgtgctgaagcacgtcaacgccctcatctccccaggacagaagattgggatctgcggccgcacaggcagtggaaaatcctccttctctctcgcctttttccgaatggtggatatgtttgaagggcgtatcatcatcgatggcattgacatcgccaagctgccgctgcacacgctccgctcacgcctgtctatcatcctacaggaccctgttctcttcagtggtaccatcagattcaacctggacccagagaagaaatgctcagacagcacgctgtgggaggctctggagatcgctcagctgaagctggtggtgaaggccctgccaggaggcctggatgccatcatcacggaaggaggggagaattttagccagggccagaggcagctgttctgcctggcccgggcctttgtgaggaagaccagcatcttcatcatggatgaagcaactgcctccatcgacatggctacggaaaatatcctccagaaggtggtgatgacagccttcgcagaccgcaccgtggtcaccatcgcgcaccgcgtgcacaccatcctgagtgcagacctagtgatggtcctgaagaggggcgcgatcctggagttcgacaagccggaaaagcttctcagccagaaggacagcgtctttgcctcctttgtccgcgcggacaaatgaccagccagcgccaaagtgccaccccacacctcacctgcttgccatggatttcttactgtaaatcacttgtaaataaagaaactaattctttgct

SEQ ID NO: 378 - DNA, 889 bp, Homo sapiens; identical to SEQ ID NO: 330

SEQ ID NO: 379 - DNA, 1423 bp, Homo sapiens
aatcctcacagcgacacagtgaaccatttcttctgacgctaggaaacatccagtgtagctgaggctgtcccaacccagtgaggagcccaggatgttcctgaaggctgtggtgctgaccgtggccctggtggccatcaccgggacccaggctgaggtcacttccgaccaggtggccaatgtgatgtgggactacttcacccagctaagcaacaatgccaaggaggctgtggaacaactgcagaagacagatgtcactcaacagctcaataccctcttccaggacaaacttgggaacattaacacctatgccgatgacctgcagaacaagctggtgcccttcgccgttcaactgagtggacatctaaccaaggaaacagagagggtgagggaagagatccagaaggagctcgaggacctacgggccaacatgatgccccatgccaacaaagtgagccagatgttcggggacaacgtgcagaagttgcaggaacacctgaggccctatgccacggacctgcaagctcagatcaacgcacagacccaggatatgaaacgccagctgaccccctacatccagcgcatgcagaccacaatacaagacaatgtggaaaacctgcagtcctccatggtgccctttgccaacgagctaaaggaaaagtttaaccagaatatggaagggctcaaggggcaactaaccccccgtgccaacgagctgaaggccacgatcgaccagaacctggaagacctgcgcagcagactggcccctctcgcggagggtgtgcaggaaaaactcaaccatcagatggaaggcttggccttccagatgaagaagaacgctgaggagctccataccaaagtctccacaaatatcgaccagctgcagaagaatctggccccgctggtggaagatgtgcaaagcaagctgaaaggcaacacggaaggactgcagaagtctctggaagacctgaacaagcagctggaccagcaggtggaggtgttccggcgtgctgtggagcccctgggggataagttcaacatggctctggtgcagcagatggagaagttcaggcagcagctgggctccgattcgggggacgtggaaagccacttgagcttcctggagaagaacctgagggaaaaggtcagctcctttatgagcaccctgcaaaaaaaggggagcccagaccagcccctagccctccccctcccggagcaggttcaggaacaggtccaggagcaggtgcagcccaaacctctggagagctgagctgtccctgtgtcctcggcccatcacagcagcagacacctgccctgccccaccacctgtctgtcactctgttcccaagcacttctcgtaccagcttgaggacacatgtcctgtgggtgacgatacctcctctcgttactcaataaagcatctgag

SEQ ID NO: 380 - DNA, 764 bp, Homo sapiens
aaggagaacttcgacaaggctcgtttctctgggctctggtatgccatcgccaaaaaggatcccgagggtctctttttgcaagacaacatcatcgctgagttttctgtcgacgagaagggtcatatgagcgctacagccaagggacgagtccgtcttctgagcaactgggaagtgtgtgcagacatggtgggcactttcacagatacagaagatcctgccaagttcaagatgaagtactggggtgtagcctcctttctccagcgaggaaacgatgaccactggatcatcgatacggactacgacaccttcgctctgcagtattcctgccgcctgcagaatctggatggcacctgtgcagacagctactcctttgtgttttctcgtgaccccaatggcctgaccccggagacacggaggctggtgaggcagcgacaggaggagctgtgcctagagaggcagtacagatggatcgagcacaatggttactgtcaaagcagaccctcaagaaacagtttgtagcaacgtcaaggatgtataaagttggaaaacttctgattagctctcatccagtcttcatctctatttatcttagaagtttagtttccccacctcccctcccttctctaggtggacattaaaaccatcgtccaaatacatgggaatgcctgaatccattcacacaaacgtgtatcttactgagaagttccccgagagacgtttgaggcttgggattccaaacttgatttattaaacgtatagtcacc

SEQ ID NO: 381 - DNA, 682 bp, Homo sapiens
caaacataatcacatgtacccaggacacaaagaacatacagagaagcctccataatttaagattatacatgtaaatacaccctagacatgcaagaatagaccacccagtgcatctagactcagacaaagaaatatacatctgtacgtttatatcagaaatgatctttcacatagaaaaagcatatagcgtgcacgcacacacacaatcccatgccctagtaagtaaacagagctgacaaaactgagctgacaagtgcacacccatccccataaaacaagaggcctaagtcccagtgcccttttgtcctgtgtatctgtttcgtggtgtccttgccaacatgtatggtgtgggtaagggaatgaggagtgaatagctaaagcaggaggcgtgaacatctgaagttgcataactgagtggaggggcggattcagcataaaagatcctgctggagagcatgcactgaagtctaccgtggttacaccaggaccatggagcccagtatcttgctcctccttgctctccttgtgggcttcttgttactcttagtcaggggacacccaaagtcccgtggcaacttcccaccaggacctcgtccccttcccctcttggggaacctcctgcagttggacagagggggcctcctcaattccttcatgcaggtgagacattcacagggcctgg

SEQ ID NO: 382 - DNA, 1519 bp, Homo sapiens; identical to SEQ ID NO: 355

SEQ ID NO: 383 - DNA, 2495 bp, Homo sapiens
attgcctaccccgggtggagaccgtgctcgtccggccctcttgcctcacgttctgcagctctgcagctccgcaatcctacaccatggcggacagccgggacccagccagcgaccagatgaagcagtggaaggagcagcgggcccctcagaaacccgatgtcctgaccaccggaggcgggaacccaataggagataaacttaatatcatgactgcggggccccgagggcccctcctcgttcaagatgtggttttcaccgacgagatggcacactttgacagagagcggattcctgagagagtggtacatgcaaagggagcaggtgcttttggatactttgaggtcacccacgatattaccagatactccaaggcaaaggtgtttgagcatattgggaagaggactcctattgccgtccgattctccacagtcgctggagagtcaggctcagctgacacagttcgtgaccctcgtgggtttgcagtgaaattctacactgaagatggtaactgggacctcgtgggaaacaacacccctattttcttcatcagggatgccatgttgtttccatcctttatccatagccagaagagaaacccacaaactcacctgaaggaccctgacatggtctgggacttctggagtctttgtccagagtctctccatcaggttactttcttgttcagcgaccgagggattccagatggacatcggcacatgaatggctatggctcacacaccttcaagctggttaatgcgaatggagaggcagtgtactgcaagttccattacaagactgaccagggcatcaaaaacttgcctgttgaagaggcaggaagacttgcacaggaagacccggattatggcctccgagatcttttcaatgccatcgccagtggcaattacccatcctggactttttacatccaggtcatgactttcaaggaggcagaaaccttcccatttaatccatttgacctgaccaaggtttggcctcacaaggactaccctcttataccagttggcaaactggtcttaaacagaaatcctgctaattattttgctgaagttgaacagatggcttttgacccaagcaacatgccccctggcattgagcccagcccggacaagatgctccagggccgcctttttgcttacccagacactcaccgccaccgcctgggaccaaactatctgcagatacctgtgaactgtccctaccgtgctcgcgtggccaactaccagcgcgatggccccatgtgcatgcatgacaaccagggtggtgctcccaactactaccccaacagcttcagcgcaccagagcagcagggctcggccctggagcaccatagccagtgctctgcagatgtgaagcgcttcaacagtgctaatgaagacaacgtcactcaggtgcggacattctatacgaaggtgttgaatgaggaggagaggaaacgcctgtgtgagaacattgccaaccacctgaaagatgctcagcttttcattcagaggaaagcggtcaagaatttcactgacgtccaccctgactacggggcccgagtccaggctcttctggaccagtacaactcccagaagcctaagaatgcaattcacacctacgtacaggccggctctcacatagctgccaagggaaaagctaacctgtaaagcacgggtgctcagcctcctcagcctgcactgaggagatccctcatgaagcagggcacaagcctcaccagtaatcatcgctggatggagtctcccctgctgaagcgcagactcacgctgacgtctttaaaacgataatccaagcttctagagtgaatgatagccatgcttttgatgacatttcccgagggggaaattaaagattagggcttagcaatcacttaacagaaacatggatctgcttaggacttctgtttggattattcatttaaaatgattacaagaaaggttttctagccagaaacatgatttgattagatatgatatatgataaaatcttggtgattttactatagtcttatgttacctcacagcctggtatatatacaacacacacacacacacacacacacacacaccaaaacacacatacactatacacacacacacacacacacactaaaacacacatacacaacacacacatacactacacacacagaacacacaacacaaacatacacacataggcacacacacacacacacacacacacacacacacacacacacacacacatgaatgaagggattataaagatggcccacccagaatttttttttatttttctaaggtccttataagaaaaaccatacttggatcatgtcttccaaaaataactttagcactgttgaaacttaatgtttattcctgtgtagttgattggattccttttccccttgaaattatgtttatgctgatacacagtgatttcacatagggtgatttgtatttgcttacatttttacaataaaatgatcttcatgg

SEQ ID NO: 384 - DNA, 4503 bp, Homo sapiens
atgacgaggattttgacagcatgcaaagtggtgaagacactgaagagtggctttggtttggccaatgtgacttcgaagcgacagtgggacttctctagacctggcatcaggctcctttctgtgaaggcacagacagcacacattgttctggaagatggaactaagatgaagggctactcctttggccatccctcctcggttgctggcgaagtggtttttaatactggcttaggagggtactcggaagcacttactgatcctgcctacaaggggcagatcctcaccatggccaaccctatcattgggaatggtggggcccctgatacaacggcacgtgatgaactgggactgaataagtacatggagtctgatggaatcaaggtggcgggtctgctggtgctgaattacagtcatgactacaaccactggctggccaccaagagtctgggtcagtggctgcaggaggagaaggtccctgcaatttatggagtggatacaagaatgctgactaaaataattcgggataagggtaccatgcttgggaagattgagtttgagggccagtctgtggactttgtggatcctaataagcagaatttgattgccgaggtttcaaccaaggatgtcaaggtgtttggcaaaggaaaccccacgaaagtggtagccgtggactgtgggataaaaaacaatgtcatccgcctgctagttaagcgaggagcggaagtgcatttggtcccctggaatcatgacttcacccagatggactatgacggacttctgatcgctggaggacctgggaacccagctctggcacagccactaattcagaacgtgaagaagattttggagagtgaccgcaaagagccgttgtttggaatcagtacaggaaacataataacaggattggctgctggcgccaaatcctacaagatgtccatggccaacagaggacagaaccaacctgttttgaatatcacaaacagacaggctttcataactgctcagaatcatggctatgctctggacaacaccctccctgctggctggaaaccactgtttgtcaatgtcaatgaccaaacaaatgaggggattatgcatgagagcaaacccttcttcgctgtgcagttccacccagaggtcagcccggggccaacagacactgagtacctatttgattccttcttctcgctgataaagaagggcaaaggcaccaccattacctcagttctgcccaagccagcattggtggcatctcgagtcgaggtttccaaggtccttatcctaggatcaggaggcctgtccattggtcaggcaggtgaatttgattactccggatctcaggctgtaaaagccatgaaggaagaaaacgtcaaaacagtcctgatgaacccgaacattgcatccgtgcagaccaacgaggtgggattgaagcaggcagatgcagtctactttctccctatcaccccccagtttgtcacagaagttatcaaggctgaacggcccgatgggttaattctgggcatgggtggccagacagctctgaactgtggagtggaactattcaagaggggtgtgctcaaggaatatggtgtgaaggtcttgggaacatcggtcgagtccattatggccacagaagacaggcagcttttctcagacaagctgaatgagatcaacgagaagattgctcctagctttgcagtggaatcaatggaggatgccttgaaggcagcagacaccattggctaccctgtgatgattcggtctgcgtatgctctgggtgggttaggctccggcatctgtcccaacaaggagaccttaatggatcttggcacaaaggcatttgctatgaccaaccagatcctggtggagcggtcagtgacaggttggaaagaaatagaatatgaagttgtccgagatgcggatgataactgtgtcacagtctgtaacatggagaatgttgacgccatgggtgttcacacaggtgattcagttgttgtggccccggcccagaccctctccaatgcagagttccagatgttgagacgcacttcaatcaatgttgttcgccacttgggcattgtgggtgaatgcaacattcagtttgctcttcaccccacttccatggaatactgtatcattgaagtgaatgccaggctctccaggagttctgccctggcctccaaggccactggctacccactggcgttcatcgcagcaaagatcgctctaggaatcccacttccagaaatcaagaatgttgtgtctgggaagacctcagcctgcttcgaacctagcctggattacatggtgaccaagattcctcgctgggaccttgaccgttttcatggaacatccagccgaattggtagctcaatgaaaagtgtaggcgaggtcatggccattggtcgcacctttgaggaaagtttccagaaggctctgaggatgtgccatccatctgtggatgggttcactccccgtctcccaatgaataaggaatggccagcaaacctggatctgaggaaggagctgtctgaaccctccagcacccgcatctatgccattgctaaggccttggaaaacaacatgtcccttgacgaaatcgtgaagctcacatccattgacaagtggtttttgtataagatgcgtgacattttaaacatggataagacactgaaagggcttaacagtgagtctgttacagaagaaactctgagacaggccaaagagattgggttctcagacaagcagatttcaaaatgtttaggactgaccgaggctcagacaagagagctgagattgaagaaaaacatccacccttgggttaaacagattgatacattggctgcagaatacccatcagtgacaaattacctgtatgttacctacaatggccaggagcacgacatcaaatttgatgaacatggaataatggtgctgggctgtggcccataccacattggcagcagtgtggaatttgattggtgtgctgtctccagtatccgcacactgcgccaacttggcaagaagacggtggtggtgaattgtaacccggagactgtgagcactgactttgatgagtgtgacaaactctactttgaagagctgtctttggagagaatcctagatatctaccaccaggaggcatgtaatggctgcatcatatcagtcgggggccagattccaaacaacttggcggttccgctatacaagaacggtgtcaagatcatgggtaccagtcctctgcagatcgatagggctgaggatcgctccatcttctcggctgtcttagatgagctgaaggtggcccaggctccttggaaagctgttaacactttgaacgaggcgctggaatttgcaaactctgtgggctatccctgcttactgagaccttcctatgttttgagtgggtctgccatgaacgtggtattctctgaggatgagatgaaaaggttccttgaggaggccactcgagtctctcaggaacacccagtggtgctgaccaagtttattgagggggctcgggaagtggagatggacgctgttggcaaagaaggacgggtcatctcccatgccatctctgaacatgttgaagatgcaggtgtccactcaggggatgccacactgatgctacctacgcagaccatcagccaaggagccattgaaaaggtgaaggatgccacacgaaagattgcaaaggcttttgccatctctgggccattcaatgttcagtttcttgtcaaaggaaatgatgtcttggtgattgagtgcaatctgagagcctctcgatccttcccctttgtctccaagactcttggggtggacttcattgatgtggccaccaaggtgatgatcggagagagtgttgatgagaagcatctacccacactggaacaacccatcatcccctctgactatgttgccattaaggctcccatgttttcctggccccgactgagggatgctgatcctattctgagatgtgagatggcttctactggagaggtggcgtgttttggtgagggcattcatacagccttcctaaaggcaatgctgtccacagggtttaagatacctcagaagggcattctgattggcatccagcaatcattccgtccaagattccttggtgttgctgagcagttacacaatgaaggtttcaagctttttgccacagaagccacatcagactggctcaacgccaacaatgttcctgccaccccagtggcttggccatctcaggaaggacagaatcccagcctctcttccatcagaaagttgataagagacggaagcattgacctagtgattaacctccccaataacaacaccaaatttgtccatgataattatgtgattcggaggacagctgtggacagtggaattgctctgctcaccaatttccaggtgaccaaactttttgctgaggctgtgcagaaagctcgtactgtggactccaagagtctgttccactacaggcagtacagcgctggaaaggcagcatag

SEQ ID NO: 385 - DNA, 1958 bp, Homo sapiens
ccttgctccatcttggctaagcctggattcccatggtcccccgacctgggtcctcccccagcctctgtacagagtagcctgggaatagatccatcttcaccccctcgagtataaataaggctgcttggttcaccaggggatagctgtgcttgtctgggctggagctaaaggacacacagaagcaagtccacagatccgtgatgactcccacgggggcaggcctgaaggccaccatcttctgcatcctgacctgggtcagcctgacagctggggaccgcgtatacatccacccctttcatctcctctactacagcaagagcacctgcgcccagctggagaaccccagtgtggagacgctcccagagccaacctttgagcctgtgcccattcaggccaagacctcccccgtggatgagaagaccctgcgagataagctcgtgctggccactgagaagctagaggctgaggatcggcagcgagctgcccaggtcgcgatgattgccaacttcatgggtttccgcatgtacaagatgctgagtgaggcaagaggtgtagccagtggggccgtcctctctccaccggccctctttggcaccctggtctctttctaccttggatcgttggatcccacggccagccagttgcaggtgctgctgggcgtccctgtgaaggagggagactgcacctcccggctggacggacataaggtcctcactgccctgcaggctgttcagggcttgctggtcacccagggtggaagcagcagccagacacccctgctacagtccaccgtggtgggcctcttcactgccccaggcttgcgcctaaaacagccatttgttgagagcttgggtcccttcacccccgccatcttccctcgctctctggacttatccactgacccagttcttgctgcccagaaaatcaacaggtttgtgcaggctgtgacagggtggaagatgaacttgccactagagggggtcagcacggacagcaccctatttttcaacacctacgttcacttccaagggaagatgagaggcttctcccagctgactgggctccatgagttctgggtggacaacagcacctcagtgtctgtgcccatgctctcgggcactggcaacttccagcactggagtgacgcccagaacaacttctccgtgacacgcgtgcccctgggtgagagtgtcaccctgctgctgatccagccccagtgcgcctcagatctcgacagggtggaggtcctcgtcttccagcacgacttcctgacttggataaagaacccgcctcctcgggccatccgtctgaccctgccgcagctggaaattcggggatcctacaacctgcaggacctgctggctcaggccaagctgtctacccttttgggtgctgaggcaaatctgggcaagatgggtgacaccaacccccgagtgggagaggttctcaacagcatcctccttgaactccaagcaggcgaggaggagcagcccacagagtctgcccagcagcctggctcacccgaggtgctggacgtgaccctgagcagtccgttcctgttcgccatctacgagcgggactcaggtgcgctgcactttctgggcagagtggataacccccaaaatgtggtgtgatgcctcctgtgtagccatggagacaaggccagcgtcagagagctatcctgggcaaaaatcagtgccttcacccctggcttcccgtcactccttccagcaaggcagaggccgtctccttggagatggcgctaactgagaataaatgatgagcagcagcctcctggggtgtgggtttgtttggacactggggtgagagccaggagctggcactctgtataggaggactgccatcctggaaaaaaaaaatggaccaaacaactgtttgtgaaataaaaaaaaaaaaattccctttttatttgaaaaaaaaaaaaaaaaaaaaaaaaa

SEQ ID NO: 386 - DNA, 1018 bp, Homo sapiens
ttgacattttctttcaggtgaccaaactttttgctgaggctgtgcagaaagctcgtactgtggactccaagagtctgttccactacaggcagtacagcgctggaaaggcagcatagagcaatatgctggtctagtgaattcatccttcagtcagcaggagccacactgtaccaaagggactggtcccagcctatcgccagaaatggatgttgttgccaaaccttatttttggtttccctgttcttagtagtctgtatctttaaccactgaattgttgtcagtcactgtttcaaaaccatcaggttcttcccaagtctcttgttcttcacaaggaatccaaccattcatacattatcttttgtagaccgacttgtaacatttcatggtgctggttaacaacaattgaagtaaaaatagttgctgccctatctcctaaattctatactctaaacatactctcatttttaaagtagcttctgccacacccagagtccactaactggacagattaccatgaaatttcattaaaataaaatgtggatttaatttatgaatggcattatgatgtttgtgtattggtattttttgggaaatgattctcatttacatagccaacctagaaatagcatttcttcttcccataatatacaatgtgagattggatttctttgatagatccttgcttgaggttttggaggatgtcagcagatgtcagagaacacagaagtggttatattcttgatattctttttagattttaacataagccaagtgaaacatatagactcatgatatttgcctttggctaaaattttggaacactttagaagttcctgttccttttgtatgatggattctgagtctcacttgcattctgcattccacacatattacgcatatggcctccatcccttgacatgctagatgtttttctttcaaggtagcttttgttgcttttaagtgttttgtttattactgtgccttaattgtgaacttttaaataaaatactattgagtg

SEQ ID NO: 387 - DNA, 1442 bp, Homo sapiens; identical to SEQ ID NO: 164

SEQ ID NO: 388 - DNA, 1442 bp, Homo sapiens; identical to SEQ ID NO: 164

SEQ ID NO: 389 - DNA, 809 bp, Homo sapiens
ggctgatacactacaacatcatgctacaaagccagtaaaatgggtctactcttccccttttctacgcagagaaagtccaaaaggagattgatcaggtgattggctctcacaggccaccatcccttgatgatcgtaccaaaatgccatacactgatgcagtcatccacgagattcagagatttgcagatcttgccccaattggtttaccacacagagtcaccaaagacaccatgttccgagggtacctgctccccaaggtgaggccacctgtgattcctcattgttactccattcatgagcatcctccactctcctaatcaccaacctcatcctgtctgtggttttccaggactgtgtttcttagggactgactgtttatcatatgggagtcagggtatgttaacatctttatcttataacttctcccagaacactgaggtgtatcccatcctgagttcagctctccatgacccacagtactttgaccatccagacaccttcaatcctgagcacttcctggatgccgatgggacactgaaaaagagtgaagcttttatgcccttctccacaggtgaggcagaattgtgattcctttcccagacactagagggcaggtcctccctctggacaccaacaccaataggtccctgttagtatactgagtctatctcagttaaacaatcccattaaatctggctacagctcatgaggggagtcttaactaactggagcatcctggtcaggacttttgggaattgtttaaggcaatgctaagaaatttaacacagcagccggtgggggtaagatcg

SEQ ID NO: 390 - DNA, 2383 bp, Homo sapiens
ctctgtgagacacctgaccgaccgctgagcgactgactggtccacagcgccggcaagatgaagttcactgtggtggcggcggcgctgctgctgctgtgtgcggtgcgggcggaggaggaggacaagaaggaggatgtaggcacggtggttggcatcgacttggggaccacctattcctgcgtcggtgtattcaagaacggccgcgtggagatcatagccaacgatcagggcaaccgcatcacaccgtcgtatgtggccttcactcctgaaggggagcgtctgattggcgatgcggccaagaaccaactcacgtccaacccggagaacaccgtcttcgacgccaagcgcctcatcggacgcacttggaatgacccttccgtgcagcaggacatcaagttcttgccattcaaggtggttgaaaagaaaactaaaccatatattcaagttgatatcggaggtgggcaaaccaagacatttgccccagaagaaatttctgctatggttctcactaaaatgaaggaaactgccgaggcgtatttgggaaagaaggtcacccatgcagttgtgactgtaccagcttacttcaatgatgcacagcggcaagcaaccaaggatgctggcactattgctggactgaatgtcatgaggatcatcaatgagccaacagcagctgctattgcatatggcctggataagagagagggagagaagaacatcctcgtgtttgacctgggtggtggaaccttcgatgtgtctcttctcaccattgacaatggtgtctttgaagtggtggccactaatggagacactcatctgggtggggaagactttgatcagcgggtcatggagcacttcatcaagctgtacaaaaagaagactgggaaagatgtcagaaaggacaacagagctgtgcagaaactccggcgtgaggtagaaaaggccaagagagccctgtcttctcagcatcaagcgaggattgaaattgagtccttcttcgaaggagaagacttctcagagacccttactcgggccaaatttgaagagctgaacatggacctgttccgctctaccatgaaacctgtccagaaagtgttggaagactctgatctgaagaaatctgatattgatgagattgttctggttggcggatctactcgaattccaaagattcagcagttggtgaaagagttcttcaatggcaaggagccgtcccgtggcatcaacccagatgaggctgtagcatatggtgccgctgtccaggctggtgtcctctctggtgatcaagatacaggtgacctggttctgcttgatgtgtgtcctcttacacttggtattgaaactgtgggaggtgtcatgacaaaactgattccgaggaacactgtggtgcccaccaagaagtctcagatcttctccacagcttctgataatcagcccaccgtaacaatcaaggtctacgaaggtgaacgacccctgacaaaagacaatcaccttctgggtacatttgatctgactggaatccctcctgctccccgtggggtaccccagattgaagtcacctttgagatagatgtgaatggtattcttcgagtgacagctgaagacaaagggacaggaaacaaaaacaaaatcaccatcaccaatgaccaaaaccgcctgacccctgaagaaattgaaaggatggtcaatgacgccgagaagtttgctgaggaagacaaaaagctcaaagagcgcattgacacgaggaatgaattggaaagctatgcttactctcttaagaaccagatcggagataaagagaagctgggaggtaagctgtctcctgaagataaagagaccatggagaaagctgtagaggaaaagatcgaatggctggaaagccaccaggatgcagacattgaagactttaaagctaaaaagaaggaactagaagaaattgttcagccaattatcagcaaactctatggaagtggaggccctcccccaactggtgaagaggatacatcagaaaaagatgagttgtaggtgcactgatctgctagagctgtaatattgtaaatactggactcaggaactttcgttgggagaaaattgagagaacttaagtctcgaatgtaattggaatcttcacctcagagtggagttgaaaatgctatagcccaagtggctgtttactgcttttcattagcagttgctcacgtgtcttggggtcagggagaggaggaattggctattttaaaattggggaaaagctgggtcagggtgtgtgttcaccttggatatgttctatttaacggttgggtcatgcacatctggtgtaggaacttttttctaccataagtgacaccaataaatgtttgttatttacactggtctagtttttgtg

SEQ ID NO: 391 - DNA, 2639 bp, Homo sapiens
aaatatagtatttaatatttttttgaaagactcagcccattacaatacagaatggaatcaccatattcctagtctcttcttccttcaccaacagcctggtgctaacacaatgcattcatcttaatatttctgtatagacatcagtgataagaaggcctccaggattttcacctttccgggcacctcgagtgaaaaagcctaaagaaagtacaactgtaagtccatcctacattgccagggtgcaagaagagagggatccaggaaatgaacaaggacccatccatgggcatggctggttgcatgcaaagcaaataaagaataagaatcaccaaggtcataagcatgggcatggtattggccatggacaccagaaaccacatggccttggtcatggacatcaacttaaacttgatgatcttaaacagcaaagggaagacggctatgaccatagacatccagtgggacatggtcatggtcagaggcatggtcatggtcatggtcatggtcacggtcgtgataaacacacaaataaagacaaaaacaatgtcaagcacactgaccagagagcagagcctttgacaagctcttctgaagacaatactacatctacacagatacaggggaggacagagggcttcaccttgaaccctcccctagctcagccagctgttatctctcgtggttttcaggactcaggtttcactgaaggtgtgatagctaccacatcaccatatgacacggagacccatgatgatttgatccctgatatccatgtacaaccagatagcctttcatttaagctgatatctgactttccagaagcaacttcccacaagtgtcctgggcgcccatggaagccagttagtaggaaggatccaaccatagaaacaacagaattttctgattttgatctcctcgatgctctttcttaacttatacagcgtaggaatctttacaaatgctttcccagcctctttttctactgcccaaacacaaatattgtgacataagtcatcaagccatgaggctcagaacagcctgtcagtaggactttataaatccctgtggactgataataaaactgccatccttctgaattccttctgagcctgcctcacacgctctctgaaccaatacaggaagaagcctaccagaatccactgctcagataatgagtgggtatctcaagatacacatcgcatttccatacagaattatggtctctgtgtttagaaaacagaaaatcaagagactgaaggttgagtttatggatgggggaaaataacagcaaaacttccagatgtcagagaaagataagaaaacagaaacaggctgatcaaagggagaaagtgggcagtaatgacttgactttatgtttctcaagcaggttaagtatatcaaacgagactcccccttgagcaggttagccttggatttccttttgtgggtgatggtgttcctcactagtctacccctggctagtctttgtcatagctttcaagcaagagctttttggtagtgttgctgaggtcagatcaagcaatccttacttctcagaagttctgcatctaacaccaagggcagaaagtagaaggaagaatattgaagtaggtttgctgtggcaaccttttagttcttgtgataaggcatgtcgtgggagttgatggaaacttcattcctaccttttagaagccagtccttagcttcaccttaaattgctctatctttttgctatgacgctgaagactattgactttggagaaagagaaagaggttatcactcatggccttagaatgtgaggaaggtgtgtggtttacaacccatgctgtgcttttgctggaaaaagaagataggactttctgaaggcagagataagtcctccaggctccagcagacagttccatacccatgatctctgagagactctaggtaaattccctggccactaaacaaagacctgaaccccagaagtgaccctgtagggaggagggacccctgacaggtatggaaggagaacacagagtgggggatcagaacagtcagaatgtgtgtgattgtgggactcactgcagagtccccacaaactccgattacagaaagcaaggtgcctgcacaatgcactggagagatgtgtgggaataggaaataaggatgctgcttcacacggctacacagcctgtgtgtgtgtgtgtatggctgttgtgggaaactgcatttgagctgagtgttctttcattttaatcattgttttcctttaaaatggagacccaatgtcactgggaaacattctcaccctgtatctggctgcgctgctttgcctaagttgagcagaagcacgagattaacagcgttttactatattacagaggctcctaaactcatgtgagtacaagggcagactcttaaaggcaggggcaggcccagcgcctgagcgtcaggcagaagcttcaaccgtgacaccatagcccggcaaagacccggagtggaaggaccagaagactcctgggatgtgtgcagtatggaagcatgtttcttcatcacctgatcctgggtgaaataaagttcagactcgacgagttcacagtgtctccttcagccattcctatcttgtagtgaattgaagctgtctccaaagctt

SEQ ID NO: 392 - DNA, 410 bp, Homo sapiens
cggatttgggcatggggaaaaggaacattgaggatcgtgttcaagaggaagcacggtgccttgtggaggaactgaggaaaaccaatggctcaccctgtgaccccacgtttatcctgggctgtgctccttgcaatgtcatctgctccattattttccagaatcgttttgattataaagatcaggattttcttaacttgatggaaaaactcaatgagaacatgaaaattttgagcagtccctccacacagttttgcagttttttccctgttttaattgattattgtccgggaagtcatacgacattagctaaaaatgtgtatcatattagaaactaccttctgaagaaaataaaagagcatcaagaatcactggatgttacaaatccccggaactttattgattattaccta

SEQ ID NO: 393 - DNA, 2061 bp, Homo sapiens
tggctgcaccatgagcgtctctgcactgagctccacccgcttcacgggcagcatctctggcttcctccaagtggcctccgtgcttggtctgcttctgctgctggtcaaagcagtccagttctacctgcaaaggcaatggctactcaaggctttccagcagttcccatcacctcccttccactggttctttgggcacaagcagtttcaaggtgacaaagaactacagcaaattatgacatgtgtggagaatttcccaagtgcctttcctcgatggttctggggaagcaaagcctacttaattgtctatgaccctgactacatgaaggtgattctcgggcgatcagatccaaaggccaatggcgtctacagattgctagctccttggatcggatatggtttgctcttgctgaatggacaaccgtggttccagcaccggcgaatgctaaccccagccttccactatgacattctgaaaccctatgtaaaaaacatggctgactccattcgactgatgctagacaaatgggaacagctggcaggtcaagactcctctatagaaatctttcaacatatctccttaatgaccctagacactgtcatgaagtgtgccttcagccacaatggcagtgttcaggtggatggaaattacaagagctatatccaggccattgggaacttgaatgacctctttcactcccgtgtgaggaacatctttcatcagaatgataccatctataatttttcttccaatggccacttgttcaaccgtgcttgtcaacttgcccatgatcacacagatggtgtgatcaagctaaggaaggatcagctgcagaatgcgggagagctggaaaaggtcaagaagaaaagacgtttggattttctggacatcctcttacttgccagaatggagaatggggacagcttgtctgacaaggacctacgtgctgaggtggacacatttatgttcgagggtcatgacaccacagccagtggagtctcctggatcttctatgctctggccacacaccctaagcaccaacaaagatgcagagaggaagttcagagtgtcctgggggatgggtcctccattacctgggatcacctggaccagattccctacaccaccatgtgtatcaaggaggccctgaggctttacccacctgttccaggcattgtcagagaactcagcacatctgtcaccttccctgatgggcgctctttacccaagggtatccaagtcacactctccatttatggtctccaccacaacccgaaggtgtggccaaacccagaggtgtttgacccttccaggtttgcaccagactctccccgacacagccactcattcctgcccttctcaggaggagcgaggaactgcattgggaaacaatttgctatgagtgagatgaaggtgattgtggccctgaccctgctccgctttgagctactgccagatcccaccaaggtccccatccccttaccacgacttgtgctgaagtccaaaaatgggatctacctgtatctcaagaagctccactaattccgttgtggagctccgaaatctgaaatgagtttcactggcagaaagctgagttggtggtgtgactagccttcttcagaagagtgcttcagagagtcctctcctcctctcttcagtacagatcacccttctcagcactggaatattcctctgctttaaagccagcacccttcccataccccctcttctaaaagccttcccttttacaaatgttcttatgacatcatcaagaccactgaaaaactccaagataatttcccatctcaatattccttactccatctaacctactaagtcccttttgaattatgaggaataattcaatttgttccatgggctccaaaactcaaggcctgagcattattgtgaaacctttattcagcctaatatcatcttcacaagactgttacctggtacgttcatctaaatctcccctgcatagtctctctacctgactattcctcacacaagtttctttaccttccctcctttctccaataaagtgtccagtgtcctgcaca

SEQ ID NO: 394 - DNA, 2970 bp, Homo sapiens
gcttgttccgccatcttagatggcgggagttagaacggagcgagcttgaagcaggaaggcttctctgccgttctccgcaggccctcagacgggccagctggccgagctttggggcgcgtgccctgaggcgcggggcgctagtgcagcgatgcggggccttcctggggccccgtcccccgggctggggacacgccgaatgtaaccgcaacccgttctctcaaccaccgctgtcgctgcactacgggacccggtgctgcccggctccctcaggtataagtattgttgaaattgcatcaatggagcacatacagggagcttggaagacgatcagcaatggtttcggactcaaagatgctgtgtttgatggctccagttgcatctcccctacaattgttcagcagtttggctatcagcgtcgggcctctgatgatggcaaactcacggattcttctaagacaagcaatactatccgggttttcttgccgaataagcaaaggactgtggtcaatgtgcggaatgggatgagcttgcacgactgccttatgaaagctctgaaggttagaggcctgcagccagagtgctgtgcagtgttcagacttcttcaggagcacaaaggtaagaaagcacgcttagattggaacaccgacgccgcctctctgattggagaagaactgcaagtggattttttggatcacgttccactcacaactcacaactttgctcggaaaacgttcctgaagcttgcattctgtgacatctgtcaaaagttcctgctaaatggatttcgatgtcagacttgtggctacaagtttcatgagcactgtagcaccaaagtacctactatgtgtgtggactggagtaatatcagacagctcttgctgtttccaaattccactgcaagtgacagtggagtcccagcaccaccctctttcacaatgcgtcggatgcgagaatctgtttcccggatgcctgctagttcccagcacagatactccacaccccatgccttcactttcaacacctccagcccttcctctgaaggttccctgtcccagaggcagaggtcaacgtccactcccaatgtccacatggtcagcaccaccctgcctgtggacagcaggatgattgaggatgcaattcgaagtcacagtgaatcagcctcaccttcagccctgtccagcagccccaacaacctgagcccaacaggctggtcacagcccaaaacccctgtgccagcacaaagagagagggcgccaggatctgggacccaggaaaaaaacaaaattaggcctcgtgggcagagagattcaagttattactgggaaatagaagccagtgaggtgatgctgtctactcggattggctcgggctcctttggcactgtgtacaagggcaagtggcatggagatgttgcagtaaagatcctaaaggtggttgacccaactccagagcaacttcaggccttcaggaacgaggtggctgttttgcgcaaaacacggcatgttaatatcctgctgttcatggggtacatgacaaaggacaacctggcgattgtgacccagtggtgtgaaggcagcagtctctacaaacacctgcatgtccaggagaccaaattccagatgttccagctaattgacattgcccggcagacagctcagggaatggactatttacatgcaaagaacatcatccacagagacatgaaatccaacaatatatttctccatgaaggcctcacggtgaaaatcggagattttggtttggcaacagtgaagtcgcgctggagtggttctcagcaggttgaacagcccactggctctgtgctgtggatggccccagaagtaatccgaatgcaggataacaacccgttcagcttccagtccgatgtctactcctatggcattgtgctgtatgagctgatgactggggagcttccctactcccacatcaacaaccgagaccagatcatcttcatggtgggccgtgggtacgcctccccagatcttagcaggctctacaagaactgccccaaggcaatgaagaggttggtggctgactgtgtgaagaaagtcaaagaagaaaggcctttgtttcctcagatcctgtcttccattgagctgcttcagcactctctgccgaaaatcaacaggagcgcctctgagccttccctgcatcgggcagctcacactgaggacatcaatgcttgtacgctgaccacatccccaaggctaccagtcttctagctgacgttatagctgttcttaggccaccaggggacgaagaagagtcagcaggcaccactttctgtttccttgggggcagaatgcatgtttccggaaaagctgctgctaaggacctagactactcacagggccttaacttcatattgccttcttttctacccttcctgccctggaaatggaagctgtccgccaagccagcctgctccagaggtatacaagtcagcgagtatttttagggcaaatggccttggagagagaaggcagggcactccggctactgcagggacatgcagttgggaacttggctcattgagcctgtacagacagtggtgcagtgccagttttgcacatggagtcctggccacctgggggagcctgctttggtactacagaacttcactttgtggacacaccttcctcttactgagtctaagatgtcctgtgcagaggatgctttccaagcacggtgctccaccttctggcagcctcccacacgctgaatctgtcttccaggagctgcccctatggggtgggctgcagcccagccctatctctatagtcacatccttgtctgtaagaaagccaggaatacaggttttcttaatgattttgggttttaattttgtttttattgagcctgataaaatacagttatctgatggttcctcaattatgttattttaataaaataaattaaatttaggtttaaaaaaaaaaaaaaaaaaaa

SEQ ID NO: 395 - DNA, 1346 bp, Homo sapiens; identical to SEQ ID NO: 273

SEQ ID NO: 396 - DNA, 1346 bp, Homo sapiens; identical to SEQ ID NO: 273

SEQ ID NO: 397 - DNA, 982 bp, Homo sapiens
gggagctgacagcagccacgcggggaagatggctgaggacttcggcttcttctcgtcgtcggagagcggggcccccgaggccgccgaggaggacccggcggccgccttcctggcccagcaggagagcgagattgctggcatcgagaatgactcgggtttcggggcacctgccgccagccaggtggcctctgcgcagcccggactcgcgagcgggggtggttcggaggacatggggactacagtcaatggagatgtgtttcaggaggctaacgggcctgccgatggctacgctgcgattgcccaggcggacaggttgactcaggagcctgagagcatccgcaagtggagagaggagcagaagaaaaggctgcaggagttggatgctgcctcgaaggtgaccgaacaggagtggcgggagaaggccaaaaaagacctggaggagtggaaccagcgccaaagtgaacaggttgagaagaacaagatcaacaacaggatcgctgacaaagcgttctaccagcagccagatgctgataccattggctatgtggcatcggaagaggcttttgtgaaagaatccaaggaggagaccccaggcacagagtgggagaaggtggcccagctgtgtgacttcaaccctaagagcagcaagcaatgtaaagacgtgtcccgcctgcgctcggtgctcatgtccctgaagcagacgccactgtcccgctagtgcctgtcaccacgggccttggtggggcagagcagcagctgcttcagccagggtggaacttctctggcagctgccacacacgcctgttctgttcctctgagtctctgggagctgggaagcgggacccttacccctttcacccaccctgtccttcctggtcccctgttccagcccctcatgactcctgtcagtccacttgattgtgactgtccctcctgatgtatttttcttggcttaaagggtgtgttaactctttttacactt

SEQ ID NO: 398 - DNA, 1112 bp, Homo sapiens
ttagtccgagtggagcgagcgagtcgagtggttgtctgttctggtctcggaaaccggtagcccttgcagcatggctgaccaactgactgaagagcagatcgcagaattcaaagaagctttctccctatttgacaaggacggggatgggacaataacaaccaaggagctggggacggtgatgcggtctctggggcagaaccccacagaagcagagctgcaggacatgatcaatgaagtagatgccgacggtaatggcacaatcgacttccctgaatttctgacaatgatggcaagaaaaatgaaagacacagacagtgaagaagaaattagagaagcgttccgtgtgtttgataaggacggcaatggctacatcagtgcagcagagcttcgccacgtgatgacaaaccttggagagaagttaacagatgaagaggttgatgaaatgatcagggaagcagacatcgatggggatggtcaggtaaactacgaagagtttgtacaaatgatgacagcgaagtagagaccctgtacagaaggtgttaaatttcttgtacagaactgttaatttgccttttctctgtttgtaacttatctgtaaaaggttccccaattgtcagaacatgcatgtatagtaattaggattcattcttccatgttttttccctatcttctgtcattgtccttcaaccttattttagaaaagtgatcaagtaccatgttgcatgtggcttctctggatatatctaagccttctgcacatctacacttagatggagttggtcaaagggaacatctgggttatgaccttttttacagtagcttttaggaaccgtcggcatgttgctgttgaagtgtggagttgtgagcgtggactgtggacagtcgacagcgtgtactaagagttgcactactgcaagcgggtgttctgtccggtactcactcgtacactatttttttgtactgctggtattgtaccagaaacattttcttttattgttacttgctttttaaactttgtttagccacttaaggaagatctgcttatggcacaatttgcctcaaatccattccaagttgtatatttgttttccaataaaaaaaaatgacaattt

SEQ ID NO: 399 - DNA, 1069 bp, Homo sapiens
tcgcttgcgtcctggaggtgctacatactgcgcatgcgtacgcgactccggtctttttccccctagcgcggccgactctgcaggtctgcgtggagccgcagttgcgggtctctgttccgcaggatggggttcgtgaaagttgtcaagaataaggcctactttaaaagataccaagtgagatttagaaggcggcgagagggtaaaactgactactatgcacggaaacgattggtgatccaggacaaaaataagtacaacacaccgaaatacaggatgatagttcgtgtaacgaacagagacatcatctgccagattgcatatgcccgtatagaaggggatatgatcgtctgtgcagcatatgcacatgaacttccaaaatacggtgtgaaagttggcctgacaaactatgctgcagcctattgcactggcctgctgctggcccgcaggcttctgaataggtttggcatggacaagatctatgaaggccaagtggaggtgaatggagacgagtacaatgtggaaagcatagacggtcagcctggtgccttcacttgctatctggatgcgggtcttgcccgaactacaactggcaataaagtttttggcgccctgaagggagctgtggatggaggcttatctatcccccatagtactaaacgattccctggctatgactctgaaagcaaggagttcaatgcagaggtgcaccggaagcacatcatgggtcagaatgtggcagactacatgcgctacctgatggaggaggatgaggatgcgtataagaaacagttctctcagtacatcaagaacaacgtgactccagacatgatggaggagatgtataagaaagctcatgctgctatccgagagaatccagtctacgagaagaagcccaagagagaagtgaagaagaagaggtggaatcgtcccaaaatgtctcttgcccagaagaaagaccgggttgctcaaaagaaggcaagcttcctcagagctcaggaacgggctgctgaaagctaaagccattttctatgaagattttttcataaagacaataaacattgatcaaagc

SEQ ID NO: 400 - DNA, 2039 bp, Homo sapiens
ccgtattcagcattctatgctctcaagttatgaaacaggaaatgatgacctcctgaacttgaggcagtttaactactactttttttaaaaaggcaccaagatacttacaaaaacatttttcttgttttgtttctccatggtttgagtttacttttaaaactttcttttcaccagctattttggagattaatctaacaaaaaacatgaaacttaaatatattttggaaatctaaattatacttagagacttaaatacattttgctgatgactggttacaatacagttacagactaggtatatgttaaatttgaataaaaagttattaaagcattaatctttttcctttcgcaaaacaagttcaccaccatgtgaaataatttcaaattaatgcataagatgtttcttccatttacaaccacaacgattcttctgtaagtcaagctcctaccattcatgctgacatttaggtagaaatttgactgttaaaaaatatgagcttcatttaaactcacctttggtcaatccctgggatttgctttcaaacataaagatcaccacaaagtattaaagaacaggctcttagcacagcaaaacttgtaaaggataaaatcattcatccttgcctctcagacaatgcctggatccctaaagagacaatccatttccaagactgacagccccagagtgtgtatccaattgaatatcgcgatgagtttattcgtcttgactggaatttggtagtaagagaaggaacatccaagtataagtaagggctggcctaaatgataccccaccgtgtgaggtgaccgcatcttcttgtgcagtgccagcctcgtctcatagacaagatggtgaaggtcggtgtgaacggatttggccgtatcggacgcctggttaccagggctgccttctcttgtgacaaagtggacattgttgccatcaacgaccccttcattgacctcaactacatggtctacatgttccagtatgactctacccacggcaagttcaacggcacagtcaaggctgagaatgggaagctggtcatcaacgggaaacccatcaccatcttccaggagcgagatcccgctaacatcaaatggggtgatgctggtgctgagtatgtcgtggagtctactggcgtcttcaccaccatggagaaggctggggctcacctgaagggtggggccaaaagggtcatcatctccgccccttccgctgatgcccccatgtttgtgatgggtgtgaaccacgagaaatatgacaactccctcaagattgtcagcaatgcatcctgcaccaccaactgcttagcccccctggccaaggtcatccatgacaactttggcatcgtggaagggctcatgaccacagtccatgccatcactgccactcagaagactgtggatggcccctctggaaagctgtggcgtgatggccgtggggcagcccagaacatcatccctgcatccactggtgctgccaaggctgtgggcaaggtcatcccagagctgaacgggaagctcactggcatggccttccgtgttcctacccccaatgtatccgttgtggatctgacatgccgcctggagaaacctgccaagtatgatgacatcaagaaggtggtgaagcaggcggccgagggcccactaaagggcatcctgggctacactgaggaccaggttgtctcctgtgacttcaacagcaactcccattcttccacctttgatgctggggctggcattgctctcaatgacaactttgtgaagctcatttcctggtatgacaatgaatatggctacagcaacagggtggtggacctcatggcctacatggcctccaaggagtaagaaaccctggaccacccagcccagcaaggatactgagagcaagagagaggccctcagttgctgaggagtccccatcccaactcagcccccaacactgagcatctccctcacaattccatcccagaccccataacaacaggaggggcctggggagccctcccttctctcgaataccatcaataaagttc

SEQ ID NO: 401 - DNA, 1758 bp, Homo sapiens; identical to SEQ ID NO: 231

SEQ ID NO: 402 - DNA, 1780 bp, Homo sapiens
tctcttgctgtttgcccaatttggggacacccatcctcaccaccagtggtggacaccacaaaaggcaaagtcctggggaagtatgtcagcttagaaggatttacacagcctgtggccgtcttcctgggagtcccttttgccaagcctcctcttggatctctgaggtttgctccaccagagcctgcagagccctggagcttcgtgaagaacaccaccacctacccgcctatgtgctcccaagatggagttgtgggaaagttactcgcagatatgttgagcaccggaaaagagagtatacctctcgagttttccgaagactgtctctacctgaatatttacagtcctgctgacttgacaaaaaacagccgattgcccgtgatggtgtggatccatggaggtggactaataataggcggagcatcaccctatagtggactagctctctctgcccacgaaaacgtggtggtggtaaccattcaataccgcctgggatttgggggattgtttagcaccggtgatgaacacagccgggggaactgggctcacttggaccagctggctgcactacgctgggtccaggataacattgcaaactttggagggaacccggattcagtgaccatctttggagagtcagcaggaggtgtcagtgtctctgctcttgtcttatctcctctggccaagaacctcttccacagagccatttctgagagtggtgtggtcctcactacaaacctggacaagaagaatactcaggctgtggctcaaatgattgctactctttctgggtgtaataacacctcatcagccgccatggttcagtgcttgcgccagaagacagaggctgagctcttggagcttacagtgaaactggacaatacctccatgtccactgtgattgatggagtggtactgccaaagacaccggaagagatcctgactgagaagagtttcaacacggtcccctacatagtgggcttcaacaagcaagagtttggctggatcattccaacgatgatgggaaatctactctctgaaggcagaatgaatgagaaaatggccagttctttcttgaagaggttcagccctaaccttaacatctctgagagtgtgattccagcaatcattgagaagtacttaagaggaacagatgaccctgccaaaaagaaggaacttctcctggacatgttttcagatgtctttttcggtatcccagctgtactcatgtcccgtagcctcagagatgccggagcgcccacctacatgtatgagtttcagtatcgcccaagcttcgtgtctgaccagagaccccagacagttcagggagaccatggtgatgaaatcttctctgtatttgggactccatttttaaaagagggcgcctcagaagaggagaccaatcttagcaagttggtgatgaagttctgggccaactttgctcgaaatgggaacccaaatggagaggggctgcctcactggccaaaatatgatcagaaggaagggtatttgcagattggtgccaccacccagcaagcccagaaactgaaaggagaagaagtggctttctggactgagctcttggctaagaatccacctcagacagaacacactgaacacacataaatgggtctctgccagcctcagtaccagaggagcaaagatggggctattccacaaaggatggctatttgccaaagatgaatcttacagaggaaactgcacaattgtacagttggggtatttgtatctcaactttgaaataaatttccttttagaaagc

SEQ ID NO: 403 - DNA, 4620 bp, Homo sapiens
taagctctgtcctcctgtcctcctgtcatcctgtcctcctgtccttccatcatgaagaagaatagagaggctcagctgtgccttttttcagctcttcttgccttcctgccctttgcttccttgctcaatggaaactcgaagtatatggtgctggtcccttcccagctctacaccgagacccctgagaaaatctgcctgcatctataccatctgaatgagacagtgactgtgacagcttccttgatatctcaaaggggaacgagaaaactgttcgatgagcttgtggttgacaaggacttgttccactgtctttccttcactatccctagattgccctcttctgaagaggaggagtcactcgacatcaacattgaaggggcaaagcataaattcagcgaaaggcgtgtggtgcttgtgaagaacaaagaaagtgttgtctttgtccagactgataagcccgtgtacaagccaggacagtcagttaaatttcgggttgtctctatggataaaaatctacaccccctgaatgagttgtttcctctggcttacattgaggatccgaaaatgaaccgaattatgcagtggcaggacattaagacagagaatgggcttaagcaattgtccttcagcctgtcagcagagcccattcagggcccctacaagatagtgattctcaaacagtcaggagtgaaggaagagcattccttcaccgtcatggaattcgtgcttcccagatttggtgtcgatgtgaaggtcccaaacgccatctctgtgtacgatgaaataatcaatgtgactgcctgtgcgatatatacctatgggaagcctgttccaggacatgtaaagataagtctttgccatggaaatccttcctttagctctgagacaaagtctgcatgcaaagaagaggactccgagctagacaacaacggctgcagcacacaagaagtgaacatcactgagttccaattaaaggaaaattacctcaaaatgcaccaggctttccatgtgaatgcaactgttacagaagaagggacagggtcagagttcagtggatctggaagaattgaagtcgaaagaaccagaaacaaattcctatttctgaaagcagactcacacttcagacacgggatcccattctttgtgaaaatccgcctagtggatatcaagggagatcctatcccaaatgagcaggtcttcatcaaagcacaagaagctggctacaccaatgctactaccactgatcagcatggcttggcaaagttctccatagataccagcagcatctcaggctattccctcaatatcaaagtctaccacaaggaggaaagttcatgtatccattcctcttgcacagcagaaagacacgcagaggaacatcatacggcctatgctgtttactccctcagcaagagctacatctaccttgacacagaagctggcgtcttgccctgcaaccagatccacacagttcaggcgcattttattctgaaggggcaggtcttgggagtgctgccacagattgttttccactacctggtcatggcccagggcagcatcctccagactggaaaccacactcatcaagtggagccaggagtatctcaagtacaaggcaacttcgccttggagatccctgtggagttcagcatggttcccgtggctaaaatgctcatctacaccatcttgcctgatggagaagtgattgcagattctgtaacgtttcaagttgaaaaatgtcttcgcaacaaagtgcacctgagcttcagcccatcccaaagtcttccagcctcacaaacccatatgcgggttacagcttctcctcagtccctctgtggcctgagagctgtggaccaaagcgtgctgctgctgaagcctgaggctgagctctccccttccttgatatatgatctaccaggtatgcaagacagcaacttcattccaagttcttatcatccatttgaagacgaatatgattgtttgatgtaccaaccaagagacactgaagagctcacatactcagtaccatatggacgagagaaggatgtctacagatatgtgagggacatgggtttaacagcattcaccaacttgaagatcaaacatcctacatattgttatgaaatgaacatggttgtactatcagcacctgctgtggaatctgaactttcaccaagagggggagagtttgaaatgatgcccttgggagtaaataaaagtccactacctaaagagccaccacgtaaagatccaccacctaaagatccagttattgagaccattaggaattattttcctgaaacctggatctgggatttagtcacagtaaactcctcaggagtgactgaagtggaaatgacagtccctgacaccatcactgagtggaaggctggagccctctgcctgtctaatgacactggtcttggcctctcttctgtggcaactctccaagccttccagcccttctttgtggagctcacaatgccctactctgtgatccgtggagaagccttcatgctcaaggccacagtgatgaactacctccctacaagcttgccgatggctgtgcagctggaagcttctcctgatttcacagctgtcccagtgggaaatgaccaagattcttattgccttggtgccaatgggaggcacacctcatcctggttggtaactcccaaatctttagggaatgtgaatttctctgtgtctgtggaagcacaacagtccccagagctctgtggttctcaggtagccacagtgcctgaaaccgggagaaaggacacagtagtcaaagtcttgatagttgagcctgaaggaatcaagaaagagcataccttcagctcacttctctgcgcatcagatgctgagctgtcagaaacattgtctctgctgcttccaccaacagtagtgaaagattcagccagagcacatttctctgtgatgggtgatatcttgagttcagccataaaaaacacacaaaatcttatccaaatgccctatggctgtggggagcagaacatggtcctttttgctccaaacatctatgttctgaaatatctgaatgaaactcaacagctgacagagaagatcaagtccaaggcccttggttacctcagagctggttatcagagagaactgaactacaaacacaaagatggctcctacagtgcttttggggatcacaatggccagggtcaaggaaacacttggctcacagcctttgtgctcaagtcttttgcccaagctcgagccttcatcttcatcgacgaatcacacatcaccgacgccttcacctggctctccaagcagcagaaggacagtggctgcttcaggagctccggatcactgttcaacaatgccatgaaggggggagtcgatgatgaaatcaccctctctgcctatataaccatggcccttctggaaagttcactcccagacacggatcctgttgtctccaaagccctgggctgcctagaggcatcttgggagaccatagagcaaggaagaaatggcagctttgtgtacaccaagacactgatggcctatgctttcgctcttgcgggaaaccaggaaaagagaaacgaaatcctgaaatcccttgataaggaagctataagggaagacaactccatccactgggaaagacctcagaaacccacaaaatcagagggttatctgtacacaccccaggcttcctctgctgaagtagagatgagtgcctatgtcgtcttagctcgcctcactgcccagccagccccatcccctgaggacctggctttgtcaatgggcaccatcaagtggctcacaaagcagcagaattcccatggcggcttctcctccacacaggacactgtggtggcccttgatgctctgtccaaatacggagcagctactttttccaaaagccagaaaactcctttggtgaccattcaatcttcagggtcattttcccaaaagttccaagtagacaacagtaatcgcctgttactgcagcaggtctcattaccagacattcctgggaactataccgtcagtgtgtcaggggaaggatgtgtgtatgctcagaccacgctgagatacaacatgcccttggagaagcagcagcctgcatttgctctaaaggtgcagacagtacccctgacttgtaacaaccccaaaggccagaacagcttccagatctcactagaaatcagttacacggggagccgtccagcctccaacatggtgattgctgatgtgaagatgctctctggcttcatcccattgaaaccaacagtgaagaagcttgaaagattagagcacgtaagcagaacagaagtgaccaccaacaacgtcctgttatatttggaccaggtaaccaatcagacactgtccttctccttcatcattcaacaagacatcccagtaaagaacctgcagcctgccattgtgaaagtgtatgactactatgagacagatgaagtggcttttgctgaatacagcagcccctgcagctcagacaaacaaaatgtttgaaactcatatctgtggacaaggcattgctggaatccccaaaccagagaactttcaaggtggtgatttgtgtttgtctctgaaatacaaatactgaacaatcttggt

SEQ ID NO: 404 - DNA, 4620 bp, Homo sapiens; identical to SEQ ID NO: 403

SEQ ID NO: 405 - DNA, 4620 bp, Homo sapiens; identical to SEQ ID NO: 403

SEQ ID NO: 406 - DNA, 1843 bp, Homo sapiens
ggcacgagcgccgagagaaccgcggccagagcgcggagaggcctgcgggcggcgacggcagcgggagggcgggcgccgtcgggccggagcctcccccgagccgcgccgcgctctggctccgagccgtgagccctttttgccgcgccccgagcgcgtggccgggggccgggcggggcgggcgctcccggaggccggggccggcggctgcccgctgggcttgggcggggcgcgggctgcccgctccgcggctcggtggtcccgccgggggccggcggcgggggaggcggcggggacgcgcggctcgccgccatggacgacaaggcgttcaccaaggagctggaccagtgggtggagcagctgaacgagtgtaagcagctgaacgagaaccaagtgcggacgctgtgcgagaaggctaaggaaattttaacaaaagaatcaaatgtacaagaggttcgctgtcctgttaccgtctgtggagatgtgcatggccaattccatgaccttatggaactcttcagaattggtggaaaatcaccagacaccaactatctattcatgggtgactatgtagacagaggatattattctgtggagaccgtgactcttcttgtagcattaaaggtgcgctatccagagcgtatcacaatattgcgaggaaatcatgaaagccggcagatcacacaagtatatggcttttatgatgaatgcctacgaaagtatgggaacgccaacgtgtggaaatactttacagatctctttgattatcttccacttacagctttagtagatggacagatattctgcctccacggtggcctctctccatccatagatacactggatcacataagagccctggatcgcttacaggaagttccacatgagggcccaatgtgtgatctcttatggtcagatccagatgaccgtggtggctggggcatttctccacgtggtgctggctacacatttggacaagacatttctgaaacatttaaccatgccaacggcctcacactggtgtcccgtgctcaccagcttgtaatggaaggatataattggtgccatgatcggaatgtggtcaccatttttagtgcacccaattactgctaccgctgtgggaaccaggctgctatcatggaattagacgacactttaaaatactcttttcttcagtttgacccagcacctcgtcgtggagagcctcatgtgacccggcgcaccccagactacttcctataaattcctccccaggacctgtctttgtatgttgaagtatacctggctttttaaaaaatatatatacatatatatatttaaaaacaacagttatctgtgtgtctctgtaacaaattgtgctatgtcttgacgttaaaacacatcatggaccaaaacgtgccatactaatggtgagccatcagcacggtgtgaacttgagtccactgtcctagccgagtcaaccaggcagccgcctgcccgcctgcctgctgtagtagccgtccttcgtgactggttaagggaaagggtcactggtggcttcatctcctttgcgcttacttggaaatttagttacaagtttaactggcatggattatagagttggagttttatttttaagaattgacaagctgacttccacttaaattcataaccctttattttgttgaaatgtatgactaactgaagaagagattcttggagtatgttgtcataacactaagatttcctttcaagtttcctgaactgaattactgttggatgttgacctgcacattctgtatatttgtcctgacagtgttgcatcctccttgctgtactgaacaaataaacttcccaatttagagag

SEQ ID NO: 407 - DNA, 2389 bp, Homo sapiens
gtctcaggcagaggtccagactcagtggaagcagaggagagagcctgaaacctggcgagcaccatgagcaacaaatgcgatgtgatcgtggtggggggcggcatctcaggtatggcagcagccaaacttttgcatgactgtggcctcagtgtggtggttctggaagcacgagactgtgtgggaggcaggacttacacaattaggaataaaaatgttaaatatgtggaccttggaggatcttatgttgggccgacccagaatcgtatcttacgattggccaaagagctaggattggagacctataaagtgaatgaagttgagcggctgatccactttgtaaagggaaaatcatatgccttcaggggcccattcccaccagtgtggaatccaatcacttacctagattataacaacctctggagaacaatggatgagatgggccaagagattcccagtgatgctccatggaaggcaccccttgctgaagagtgggactacatgacaatgaaagagttgctagataagatctgctggaccaactctacaaagcagattgccacactctttgtgaacctatgtgtaactgcggagacccatgaggtttctgcactgtggttcctgtggtatgtgaagcagtgtgggggtacaaccagaatcatatcaacaaccaatggaggacaggagaggaaatttattggtggatctggtcaagtgagtgagcggataaaggatatccttggggacagagtgaagctggagaggccggtgatccacattgaccagacaggagaaaatgttgttgtgaaaaccctaaaccatgaaatatatgaggctaaatatgtgattagtgccatcccacctgttttgggcatgaagattcaccatagtcctcctctgcccattctaagaaaccagctgattactcgtgtgcctttgggttcagttattaagtgcatggtttattataaagaacccttctggaggaaaaaggatttctgtggaaccatggttattgaaggagaggaagctccaattgcgtacacattggatgataccaagccagatgcaggctgtgctgctataatgggatttatccttgctcacaaagctagaaaactggtacgccttactaaagaagaaagactgaggaagctctgtgagctatacgcgaaagttctgaactctcaagaagctctgcagccagtccattatgaagagaagaactggtgtgaggagcagtactccgggggctgctacacagcctacttccctcctggcatcttgacccagtatggaagggttctacgccagccagtgggcaagattttctttgcaggcaccgagacagcttcacattggagtggctacatggagggggctgtagaggctggagagagagctgccagagagattcttcatgccattgggaagattccagaggatgaaatttggcagccagaaccagaatctgtggatgtcccagcaagacccattaccaacaccttcctggagagacacttgccttctgtaccaggtctactaaagctgcttggattgaccaccatcttgtcagcaacagctcttggtttcctggcccacaaaaagggtctgtttgtacgtttctaaagatgggctttaggaccatatccacaggtttctcattcagtgtgtcacaaaagcttttggaaggagttgggataaaaatctgacaaaggtgcagagattatggagtgagaaagcacagtaacttggtctccattttggctatcttttagcatcgctgtggtccactcattttcaactttcctgcactctgaatattgagaacagatacacaggctctctcacaacctacctgccctatgcacatagttgtttttcaaaaccctatgcctttgtgcttgtctttcttctggtgtgttaggtcctcacctatatcaagttcttcatcattgtacctagaatcctgtcttgttagaaccagaaggcattagacactgtagcttattgtctactttagagttaaataaaccaaatgcaacagaagtgaaatctaaccacacaaggcctacacaaagctactggtatttgggtgactggaacacaagctgatgcttttctcacctcccaaggttcattcccctgtgatcctcctccaccttatgtcatagtcattcacggatcattgttcttgtggatttactctgtattaactggtattgtgttactcagtagattcttctaggcttgctattttgtgtagtgttgccagctgattctaatttttcttgagaatgggagtcttgtctttgtcatttcttttttgcatcttccagtatgcttccactcatagatttaagacatgcttaaataattaaaaataaagctg

SEQ ID NO: 408 - DNA, 399 bp, Homo sapiens
accgtgtacaaggaataattaccttttttggcattttcctcctaggaaaacggatgtgtgcaggagagggcctagcccgtatggagttatttttattcctgaccacgattttacaaaactttaagctgaaatctgtacttcacccaaaggatatcgatacaactccagttttcaatggatttgcctctctgccaccattttatgagctgtgcttcattcctctctaaagagatcaaattggctggggatttagctcagtggtagagcgcttacctaggaagcacaaggccctgggttcggtccccagctccgaaaaaaagaaccaaaaaaataaataaataaataaataaagagatcaaattgcctggctccggatgtattgtattttctcccttcaaa

SEQ ID NO: 409 - DNA, 147 bp, Homo sapiens
tcaatttccccaaaagccaaaaattgggagacaattttacatggactttggaaaacatttttttcctttgcattcatctctcaaacttagtttttatctttgaccaactgaacgtgaccaaaaaccaaaagtgcattcaaccttacc

SEQ ID NO: 410 - DNA, 801 bp, Homo sapiens
gtcggctgtgtcaagatgaagctgaatatctccttccctgccactggctgtcagaaactcatagaagtggatgacgaacgcaagcttcgtacgttctatgagaagcgcatggccacagaagtagctgctgatgctcttggtgaagagtggaagggttatgtggtccggatcagcggtgggaatgacaaacaaggttttcccatgaagcaaggcgttttgacccatggcagagtgcgcctgcttttgagtaaggggcattcttgttatagacctaggagaactggagagaggaagcgcaagtctgtccgaggatgcattgtggatgccaacctgagtgttctcaacttggttattgtaaaaaaaggagagaaggatattccaggactgacagataccactgtgcctcgtcggttgggacctaaaagagctagtagaatccgaaagctttttaatctctccaaagaagatgatgtccgccagtatgttgttagaaagcccttaaacaaagaaggtaagaagcccaggaccaaagcgcccaagattcagcgtcttgttactccccgtgtcctgcaacacaaacgccgacgtattgctctgaagaagcaacgcactaagaaaaacaaggaggaggctgcagaatatgctaaacttttggccaagagaatgaaggaagccaaagagaagcgccaggaacagattgccaagagacgtaggctgtcttcgctgagagcttctacttctaaatctgagtccagtcaaaaataagtctttaaagagtaacaaataaataatgagaccttg

SEQ ID NO: 411 - DNA, 801 bp, Homo sapiens; identical to SEQ ID NO: 410

SEQ ID NO: 412 - DNA, 2583 bp, Homo sapiens
atggactgtattgacaggtcaaacagaagacactgatgccagaagcccagtgtcaacactggagccaagcagagaccaacctcagtgccatattcggagagcttgaagactagcttcatgtgaagactccttctcctccagcagcacaaagcaaccatccttccaggatgattttattcaaacaagtgggttattttgtttccttgttcgctacagtttcctgtgggtgtctgtcacaactgtatgcaaataccttcttcagaggtggggatctggctgccatctacaccccggatgcccagcactgtcagaagatgtgcacgtttcaccctaggtgcctgctcttcagcttccttgccgtgagtccaaccaaggagacagataaaaggtttgggtgcttcatgaaagagagcattacagggactttgccaagaatacaccggacaggggccatttctggtcattctttaaaacagtgtggccatcaattaagtgcttgccaccaagacatatacgaaggactggatatgagagggtccaactttaatatatctaagactgacagtattgaagaatgccagaaactgtgcacaaataatattcactgccaatttttcacatatgctacaaaagcatttcacagaccagagtacaggaagagttgcctgctgaagcgcagttcaagtggaacgcccaccagtataaagccagtggacaacctggtgtctggattctcactgaagtcctgtgctctctcagagatcggttgccccatggatattttccagcactttgcctttgcagacctgaatgtaagccaggtcgtcacccccgatgccttcgtgtgtcgcaccgtttgcaccttccatcccaactgcctcttcttcacattctacacgaatgagtgggagacggaatcacagaggaatgtttgttttcttaagacatctaaaagtggaagaccaagtccccctattattcaagaaaatgctgtatctggatacagtctcttcacctgcagaaaagctcgccctgaaccctgccatttcaagatttactctggagttgccttcgaaggggaagaactgaacgcgaccttcgtgcagggagcagatgcgtgccaagagacctgtacaaagaccatccgctgtcagttttttacttactcattgcttccccaagactgcaaggcagaggggtgtaaatgttccttaaggttatccacggatggctctccaactaggatcacctatgaggcacaggggagctctggttattctctgagactgtgtaaagttgtggagagctctgactgtacgacaaaaataaatgcacgtattgtgggaggaacaaactcttctttaggagagtggccatggcaggtcagcctgcaagtgaagttggtttctcagaaccatatgtgtggagggtccatcattggacgccaatggatactgacggctgcccattgctttgatgggattccctatccagacgtgtggcgtatatatggcgggattcttaatctgtcagagattacaaacaaaacgcctttctcaagtataaaggagcttattattcatcagaaatacaaaatgtcagaaggcagttacgatattgccttaataaagcttcagacaccgttgaattatactgaattccaaaaaccaatatgcctgccttccaaagctgacacaaatacaatttataccaactgctgggtgactggatggggctacacaaaggaacgaggtgagacccaaaatattctacaaaaggcaactattcccttggtaccaaatgaagaatgccagaaaaaatatagagattatgttataaccaagcagatgatctgtgctggctacaaagaaggtggaatagatgcttgtaagggagattccggtggccccttagtttgcaaacatagtggaaggtggcagttggtgggtatcaccagctggggtgaaggctgtgcccgcaaggagcaaccaggagtctacaccaaagttgctgagtacattgactggatattggagaagatacagagcagcaaggaaagagctctggagacatctccagcatgaggaggctgggtactgacggggaagagcccagctggcaccagctttaccacctgccctcaagtcctactagagctccagagttctcttctgcaaaatgtcgatagtggtgtctacctcgcatccttaccataggattaaaagtccaaatgtagacacagttgctaaagacagcgccatgctcaagcgtgcttcctgccttgagcaacaggaacgccaatgagaactatccaaagattaccaagcctgtttggaaataaaatggtcaagggattttattaggtagtgaaattaggtagttgtccttggaaccatcctcatgtaactgttgactctggacctcagcagatcacagttaccttctgtccacttttgacatttgtgtactggaacctgatgctgttcttccacttggagcaaagaactgagaaacctggttctatccattgggaaaaagagatctttgtaacatttcctttacaataaaaagatgttctacttg

SEQ ID NO: 413 - DNA, 1821 bp, Homo sapiens
gaattcgttacctcctccatctcagagaaccctgtggatgtccgggtgagctctgaggaaagtgaggagatcccgccgttccaccctttccatcccttcccatccttgtctgagaacgaagacactcagccggagttgtaccacccaatgaaaaaaggatctggaatggcagagcaagatgggggcctgattggtgcagaagaaaaggtgatcaacagtaagaataaaatggatgaaaatatggtcattgacgagactctggatgttaaggaaatgattttcaatgctgagagagttgggggtctggaggaagagccggactctgtggggcctctacgggaggacttcagtttgagcagcagtgcccttattggcttgctggtcatcgcggtggccattgctacagtcatcgtcatcagcctggtgatgctgaggaagaggcaatacggcaccatcagccatggcattgtggaggttcatccaatgctcaccccagaagagcgtcacttgaacaagatgcagaaccacggctatgaaaacccaacctacaaatacctggagcagatgcagatttaaggacagcagcgtgtgcgacaccctggctgaggctgctgcaggtgggctggaagagcctcagcgtttgtgcttgactgctgaccaccagcggtgccagaggcctcatcctacatcctgctctcctggattgttaagactataaagtactactgtaggattgcaatttccattcttttaaatgggtttaaaagatgttaatataacaatatatgatatataaaccttaagtgaaaaaaagatctattgcagatatctgatggatgtagttttctttttttaaattagaaatgccacttctattgtattgtctcacacatgctctatataaatggaaaatgttgatttttcaatgatagactatatacacaggctgttcccgttatgtaagtctgttctttaggctcgtttgctgggctggttttgtcgtcatttgttttaatgtataaaggcagtattccccttttcaggttgctgagaaatgtaagtggaactgaagtacattgtatgcagttactgactgttttaggcatagtctccttggaagcctagagcttccagtgccgggtgtccagtgcctgtcaccaaagcaagggctaagtcaccttgagctagctggatgcaaactagatccactgtgctttccttcaaatccagttcttccacagcaaccagcccatagttgttctgtgttcttccacagctgtttacggtagcctcctagccactctcctcagcaagtgcatccaagagtgcaccacccccttctttggacgtctccgtcccatgcactgaccctctgcttgccttcgtacctcacttcctccaccgctcttcagcccctttgatgtcccctcagagaataccgatatacacatggctaaggacccaggagacttcacgggaggcctcattaggtgaaaggacgatgttctgggctgtacatgaaattggatctgtagacactgtgtttccttcactgacttgtaatgtcacgcagctggagttgatgccacaacccttagtgctttgttgctgttttgtttttcagggttctggtaacctgctactgtttttgttttggttttggtttggttttttttgtatttttctgtgatttccctccccttcccccccatgcctcttcccactatgcacagatggaaactttacctacaaactccttcgtatgatctgtggagaatgtacagaacttattacatcaataaaacactttaacttcccccg

SEQ ID NO: 414 - DNA, 1821 bp, Homo sapiens; identical to SEQ ID NO: 413

SEQ ID NO: 415 - DNA, 981 bp, Homo sapiens; identical to SEQ ID NO: 26

SEQ ID NO: 416 - DNA, 2352 bp, Homo sapiens; identical to SEQ ID NO: 208

SEQ ID NO: 417 - DNA, 511 bp, Homo sapiens
  misc_feature (137)..(137): n is a, c, g, or t
cctgaacttggttccttttatgacagccgctttggttcactcacaaagaacttcaaagaatttggcagtaagacctctgattctgacatcttcacagacatcgagaaccctagctcccatgtacctgagttttcttncagtagtaaaacctcaactgtcaggaaacaagtaaccaagagctataaaatggcagatgaggcagcaagtgaagctcaccaagaaggagacactcgaaccaccaagaggggccgagctcgcacaatgagaggtatccacgcttaactctgggaagttgccctgaccccctagactaagttaaccatttctgcaaagtgcttaccaggcgcgctctttcttaacctcttctagtgctttggtggaatctcattttttttcatgctagactgtacgttccttgggggcagggactttgccatgtgtctatttctctaattccccaatgcataacagtgcagtcatttctcaataaatatattttaaataaatgaac

SEQ ID NO: 418 - DNA, 511 bp, Homo sapiens; identical to SEQ ID NO: 417
  misc_feature (137)..(137): n is a, c, g, or t

SEQ ID NO: 419 - DNA, 4161 bp, Homo sapiens
ggaccgccaccaagacaggcgacgggtcacctggacgcgagtctgagtccgggtcccgtcgtcgttgccgacgcagtcaccgggcacgaccgtgggactcagtctgactcggattaatcccggagagccagagccaacgactgccgagccgggatgcgaccctcagggactgcgagaaccaagctactgctgctgctggctgcgctctgcgccgcaggtggggcgctggaggaaaagaaagtttgccaaggcacaagtaacaggctcacccaactaggcacctttgaagaccactttctgagcctccagaggatgttcaacaactgtgaagtggtccttggaaacttggaaatcacctatgtgcaaaggaattatgacctttccttcttaaagaccatccaggaggtggctggctatgttctcattgccctgaacaccgtggagagaatccctttggagaacctgcagatcatcaggggaaatgctctctacgaaaacacctacgccttagccgtcctgtccaactatggaaccaacaaaactgggcttagggaactgcccatgcggaacttacaggaaattctgatcggtgctgtgcgatttagcaacaaccccatcctctgcaatatggagaccatccagtggagggacatcgtccaagatgtctttctgagcaacatgtcaatggacgtacagcgccacctgacgggctgcccgaaatgtgatccgagctgtcccaatggaagctgctggggaagaggagaggagaactgccagaaattgaccaaaatcatctgcgcccagcaatgttcccggcgttgtcgtggcaggtcccctagcgactgctgccacaaccagtgtgccgcagggtgtacagggcccagagagagtgactgtctggtctgccacaggttccgagatgaagccacgtgcaaagacacctgcccaccactcatgctgtacaaccccaccacgtaccagatggatgtcaaccctgaggggaagtacagctttggtgccacctgtgtgaagaaatgccccagaaactacgtggtgacagatcacggctcgtgtgtccgggcctgtgggccagactactatgaagtagaagaagatggagtcagcaagtgtaaaaaatgtgacgggccctgccgcaaagtttgcaatggcataggcattggtgaatttaaagacacactctccataaatgctacaaacatcaaacacttcaagtactgcactgccatcagtggggacctccacatcctgccagtggcctttaagggggattctttcacccgcactcctcctctagacccacgggaactagaaattctcaaaactgtgaaggaaataacagggtttttgctgattcaggcttggcctgaaaactggactgacctccatgcttttgagaacctagaaataattcgtggcagaacaaagcaacatggtcagttttctctggcggttgtcggcctgaacataacatcgctggggttgcgttccctcaaggagatcagtgatggggatgtgattatttctgggaaccgaaatttgtgctacgcaaacactataaactggaaaaaactcttcgggacgcccaatcaaaagaccaaaatcatgaacaacagagctgaaaaggactgcaaggccacgaaccacgtctgtaatcctttatgctcctcggaaggctgctggggccctgagcccacggactgtgtctcctgccagaatgtgagcagaggcagggagtgcgtggacaagtgcaacatcctggagggggaaccgagggagtttgtggaaaattctgaatgcatccagtgccatccagaatgtctgccccagaccatgaacatcacctgtacaggccgggggccagacaactgcatcaagtgtgcccactatgttgatggtccccactgtgtcaagacctgcccttcgggcatcatgggggagaacaacaccctggtctggaagtttgcagatgccaataacgtctgccacctctgccatgcaaactgtacctatggatgtgctgggccaggccttaaaggatgtcaacaaccagaagggccaaagatcccatccatcgccactgggattgtgggtggcctcctcttcatagtagtggtggcccttgggatcggcctcttcatgcgtcgacgtcagcttgtccgaaaacgtacactacgccgcctgcttcaagagagagagctcgtggaacctctcacacccagcggagaagctccgaaccaagcccacttgaggatattaaaggaaacagaattcaaaaagatcaaagttctgggttcaggagcatttggcacagtgtataagggtctctggatcccagaaggcgagaaagtgaaaatccctgtggccatcaaggagttaagagaagccacatctcccaaagccaacaaggaaatccttgatgaagcctacgtgatggccagtgtggacaaccctcatgtatgccgcctcctgggcatctgtctgacctccactgtccagctcattacacaactcatgccctatggttgcctcctggactatgtccgagaacataaggacaacattggctcccagtacctactcaactggtgtgtgcagattgcaaagggcatgaactacctggaagaccggcgtttggtacaccgtgacttggcagccaggaatgtactggtaaagacaccacagcatgtcaagatcacagattttggactggccaaactgcttggtgctgaggagaaagaataccatgcagaggggggcaaagtgcctatcaagtggatggctttggaatcaattttacaccgaatttatacacaccaaagcgacgtctggagctatggagtcaccgtgtgggaactgatgacctttgggtccaagccttatgatgggatccctgcaagtgagatctcatccatcctagagaaaggagagcgccttccacagccacctatctgcaccatcgacgtctacatgatcatggtcaagtgctggatgatagatgctgatagccgcccaaagttccgagagttgattctcgaattctccaaaatggccagagacccacagcgctaccttgttatccagggggatgaaaggatgcatttgccgagccctacagactccaacttttaccgagccctgatggaggaggaggacatggaagacgtagttgatgctgatgaatacctcatcccacagcaaggcttcttcaacagcccatccacgtcacggactccactcttgagctctctgagtgcaaatagcaacagttccactgtggcttgcattaatagaaatgggagctgccgtgtcaaagaagacgccttcttgcaacggtatagctccgatcccaccagcgtcctgacagaggacaacatagatgacacattccttcccgtgcctgaatatataaaccaatctgttcccaagaggccggctggctctgtgcagaacccagtctatcacaatcagcccctgcatccagctcctggaagagacctgcattatcaaaatccccatagcaatgcggtgagcaaccctgagtatctcaacactgcccagccgacctgcctcagtagtgggtttgacagctctgccctctggatccagaaaggcagccaccaaatgagcctggacaaccctgactaccagcaggacttctttcccaaagaagccaagccgaatggcatctttaagggccccacagctgaaaatgcagagtacctgcgggtggcaccgccaagcagtgagtttagtggagcatgacattgaagaggcattgtaccagttacaaaccggactttccagaggcccaggaccaagccatggcagcacctctgctcctgacagccatgtccacattgtgtcaaatgtcaaaccctcagactggctttaaagcataactctgacgggctttgtcactgagccaagaagtgggcccctcccctgatgctctttgggaagttgaaggtatatctattggtcttcgaactgtgaagattccactgaaaggtatccatcgagaacattgtccttttggaacagaaggttgcctcatggtgaggtacatagggggaaaaaaaacagacctatggcgcttgctgacatagggaactctgggattcttgtctttattgatttgct

SEQ ID NO: 420 - DNA, 2300 bp, Homo sapiens
ggaattctgacagtatcggctgctctttgtcaataaacagggcactacctgtattgatctctgcctggtcctctggctggctgagcctctgtaggaggtgcccaaagccctggtggatttcttcctcagtgatctctgtgagattgaacttgagaccttctagaatctcttccatggtgctgtcttttgctcccagagacaaaatggccaaggcagctgagatgctaagaggggagaagacaacatttttatctggattcctcaaagccagcttcttgtagaggctcaatggttatgaaaggatctcgcttgtcctctatcggcccgccccgggatcacctctgcctttaaagtcgccaggtcgcgcaaagctggagttctgcctccttgcctggatggggcgcgtagtctctggctctaaactcttggcttctcagacacgatctatggctgtgttgagccgcatgagactgagatgggcgcttctggacactcgtgtgatgggccatggcctctgcccacaaggggccagagccaaggccgcgatccctgcagccctccgggatcacgagagcacggagggtccaggaacaggtcaagaccgaccgcgcctgcggagtctggcggagcttccgggacccggaacgctacgctttttattccagctatttctacgaggctatgtgctgcacttgcacgagctccaggcgctgaacaaggccaagtacggcccaatgtggacaaccacctttgggactcgcaccaatgtgaatctggctagcgccccgctcttggagcaagtgatgagacaggagggcaagtaccccataagagacagcatggagcagtggaaggagcaccgagaccacaaaggcctctcctatgggatcttcatcacacaaggacagcagtggtaccatctgcgtcatagtttgaatcagcggatcgtgaagcctgctgaggcagccctctacacagatgccttaaacgaggtcatcagtgactttattgcccggctggaccaggtgcggacagagagtgcatcaggggatcaggtgccagatgtggccaatcttctctaccaccttgccttggaagccatctgctatatcctgtttgagaaaagggttggctgcctggagccctccatccctgaggacaccgccaccttcatcagatctgttggactcatgttcaagaactcagtctatgtcactttccttcccaagtggtctcggcctctgctgcccttttggaagcgatacatgaataactgggataacattttctccttcggggagaagatgattcatcaaaaagtccaggagatagaagcccagctacaggcggctgggccagatggggtccaggtatctggctacctgcacttcctgctgactaaggaattgctcagtcctcaagagactgtcggcacctttcctgagctgatcttggctggggtagacacgacatccaatacactgacctgggccctgtatcacctttcaaagaacccagagatccaggaagccttgcacaaggaagtgactggtgtggtacccttcgggaaggtgccccagaacaaggactttgcccacatgcccctgctaaaagctgtgattaaggagaccctgcgcctctaccctgtggttcccacaaactcccggatcatcacagaaaaggaaactgaaattaatggcttcctcttccctaagaatacacagtttgtgttatgccactacgtggtgtcccgagatcccagtgtctttcctgagcccgagagcttccagcctcaccgatggctgaggaagagagaggacgataactccgggatccaacacccatttggctctgtgccctttggctatggggttcggtcctgcctgggtcgcaggattgcagaactggagatgcaactcctgctgtcaaggctgatacaaaagtatgaggtggtcctgtctcccgggatgggagaagtgaagtctgtgtcccgcatcgtcctggttcccagcaagaaggtgagcctacgctttctgcagagacagtagtaccaagctgggctcctgtctccatgggacttgtcagaagccctggcacagaagttcttggccagtctcacgtcacatgtcacgatgccagattcaacaggggacctctctgcccttcccatagacaccagacgtctggcacaatctctactgagcagcacccatttaagacattagagcacctcatatcacaggacggtgcttgggtacaatttaaaataaaatttaaaattcaaattttaaaaaaaaaaa

SEQ ID NO: 421 - DNA, 1609 bp, Homo sapiens
gtgtgctggagccactgtcgccgatctcgcgcacgctactgctgctgctcgcccgtcgtcccccatcgtgcactaagcggtcccaaaagattcaaagtccaagatggcagccctcaaggaccagctgattgtgaatcttcttaaggaagaacaggtcccccagaacaagattacagttgttggggttggtgctgttggcatggcttgtgccatcagtatcttaatgaaggacttggctgatgagcttgcccttgttgatgtcatagaagataagctaaagggagagatgatggatcttcagcatggcagccttttccttaagacaccaaaaattgtctccagcaaagattatagtgtgactgcaaactccaagctggtcattatcaccgcgggggcccgtcagcaagagggagagagccggctcaatttggtccagcgaaacgtgaacatcttcaagttcatcattccaaatgttgtgaaatacagtccacagtgcaaactgctcatcgtctcaaacccagtggatatcttgacctacgtggcttggaagatcagcggcttccccaaaaacagagttattggaagtggttgcaatctggattcggctcggttccgttacctgatgggagaaaggctgggagttcatccactgagctgtcacgggtgggtcctgggagagcatggcgactccagtgtgcctgtgtggagtggtgtgaacgtcgccggcgtctccctgaagtctctgaacccgcagctgggcacggatgcagacaaggagcagtggaaggatgtgcacaagcaggtggttgacagtgcatacgaagtgatcaagctgaaaggttacacatcctgggccattggcctctccgtggcagacttggccgagagcataatgaagaaccttaggcgggtgcatcccatttccaccatgattaagggtctctatggaatcaaggaggatgtcttcctcagcgtcccatgtatcctgggacaaaatggaatctcagatgttgtgaaggtgacactgactcctgacgaggaggcccgcctgaagaagagtgcagataccctctggggaatccagaaggagctgcagttctaaagtcttcccagtgtcctagcacttcactgtccaggctgcagcagggtttctatggagaccacgcacttctcatctgagctgtggttagtccagttggtccagttgtgttgaggtggtctgggggaaatctcagttccacagctctaccctgctaagtggtacttgtgtagtggtaacctggttagtgtgacaatcccactgtctccaagacacactgccaactgcatgcaggctttgattaccctgtgagcctgctgcattgctgtgctacgcaccctcaccaaacatgcctaggccatgagttcccagttagttataagctggctccagtgtgtaagtccatcgtgtatatcttgtgcataaatgttctacaggatattttctgtattatatgtgtctgtagtgtacattgcaatattacgtgaaatgtaagatctgcatatggatgatggaaccaaccactcaagtgtcatgccaaggaaaacaccaaataaaccttgaacagtg

SEQ ID NO: 422 - DNA, 1016 bp, Homo sapiens; identical to SEQ ID NO: 321

SEQ ID NO: 423 - DNA, 539 bp, Homo sapiens
cctcggcctccgggctgcgggaacgcccggactgggaacgccacgtcgagaggcgttcgcggaaggcgcgggatccaggacgtgctggtcacccccaaaccccaggccacccattatcgccttggttcgcccatcagagttgtaagaaaatggcagacaagccggacatgggggaaatcgccagcttcgataaggccaagctgaagaaaaccgagacgcaggagaagaacaccctgccgaccaaagagaccattgaacaggaaaagaggagtgaaatctcctaaaagcctaggaagatttccccaccccaccccttcatctccaagaaccccctcgtgatgtggaggaagagccacctgcaagatggacgcgagccacaagctgcactgtgaacccggcactccgcgccgatgccaccggcccgtgggtctctgaaggggacccccccactaatcggactgccaaatttcaccggtttgcccagggatattatagaaaattatttgtatgattgatgaaaataaaacacacctcgtggc

SEQ ID NO: 424 - DNA, 1164 bp, Homo sapiens
tggaggtcagatgaggatgctggatcccctgtagctgagttacaagtggttgtgggcagccccattaggtgctgggaactaaaaagggtcctctggaaaagcagtcagttactctaacagctcccccttccacttcctgacaaggccctacaagttctgtaggataactttaccatttttgttttgttttgggaaaggttcttaccatgtagccttaactatcctagaaattactacattgaccaggctagtcttcaactcacaagttccgtttgccggctcactcctgactgctgggattaaaggcatgggccaccatgccccacaaacataatttttatttaaggacatttaaaacctttttgtccagttctatattctgatgtaaatttcgtgtaaagttattaagttccacctgtggctacacaaatatttccctatggctgctgtctcccccgccagttttgctctggttcctggagggccacacagatgagttcgggggggggggggtggaggggtggggccacgacaccaaagctgaagagacccaagcgtgtacacccaagggccaccttttgcagtttctaagagcagaatcagaacgctgaaaagaagaaacgaattcactcacactagagacaagtctctcagagatttcagtctagagtcacagtgacttggcaaaatctgagccggtcctttagctgccccacccttccccttgcgtgcaaaggcgatttcccacatctgaccaaggactaacccacacaggcaggtcccacgaagctcgaaaattttctgttggaactttccattttgttcccagaagatcttggacagggagcagttgaatttacccaatatgtaaccatatcctcaaaacctctctcactctcaagctcccagaaacccttttgacttccatatacagaagtcctaggccagccctaaactgcttctccctgccaataacttggtatcctccccccagcgcctctgggctcggcaatccagccccgccctcgctggctgccctgcacagtgggctgggccggaaaagcaagatataaagcctgaaagtgctcagtacagctcgcactagcctaggctgtggcacgcaggatctttcctgaagcatttcagggtctgcctggcaaccag

SEQ ID NO: 425 - DNA, 1500 bp, Homo sapiens
cgccgagcacaaacccagcgagcattgaacactgcacacggccatctgcccagagagctgtgaccaccacttccgctactatctactcagaaagtcgtgactactgagccactgctgcctgcccagattctcatccaccgcctgctgcgtctggttgcgatgccggagttcctaactgttgtttcttggccgttcctgatcctcctgtccttccaggttcgcgtagtcgctggagccccccagccatggcactgtgctccctgcactgctgagaggctggagctctgtccacccgtgcctgcttcgtgccccgagatttctcggcctgcgggctgtggctgctgcccgacatgtgccttgccactgggtgctgcctgtggtgtggccactgcgcgctgcgctcagggactcagctgccgtgcgctgccaggggagcctcgacctctgcatgccctcacccgtggccagggagcctgtgtactagaacctgccgcacccgccacgagcagcttgtccggttctcagcatgaagaggcaaaggctgctgtggcctctgaggatgagcttgccgagagcccagagatgacagaggaacagctgctggatagcttccacctcatggccccatcccgtgaggaccagcccatcctgtggaatgccattagcacctacagcagcatgcgggcccgggagatcactgacctcaagaaatggaaggagccctgccaacgggaactctataaagtgttagagagattagctgccgctcaacagaaagcaggagatgagatctacaaattttatctgccaaactgcaacaagaatggattttatcacagcaaacagtgcgagacatctctggatggagaagctgggctctgctggtgtgtctacccatggagtgggaagaagatccctggatctctggagaccagaggggaccccaactgccaccagtattttaatgtgcaaaactgaaagttgtttcctccctccttcttcacacaaaatatttaagtatatagtgtatttatactccggagcacaccattttatatatgtgtatatgtatatatccaggaactagtttttatactccacatgctgcttgatgtacaagtgggtttgtatttattcactctaagtttatttttttctaccctgtccttgtgctgtattaatttatataactgaagcttttctcatctccatacatgtaaatactaccatctcagctcttccagagttctgctttgaaagggcagcgcggtagtgcctagaacgagcacaagtcagtctgaggtaggggcctttcagtgggttcagggaggaaggttagccctggctcggggagacttcctcatcgaatcccacaggtctgtgtctgatgcctattggctgggaaggttccgatgttggttgtgtaatcaaagctaaacgtggaaagctgcgtcccatgcactgttaaacacacgtctggaataaaacattctacctgga

SEQ ID NO: 426 - DNA, 3109 bp, Homo sapiens
cccgtctgggagctcgcggttcctgtgctgactctcaaagggctgactgaccctcgcacctagcaggtacttctggattgcaagtccagggttctgggccggtgaccctgttttctctacttcctgtctttgaccttgggtaccttccaacccactgttgccatgaagattgcagtaatcggacagagcctgtttggccaggaggtttactgccagctgaggaaggagggccacgaggtggtgggtgtgttcacaatcccagacaaggatgggaaagcagaccccctgggcctggaggctgagaaggatggccgtgccgtgttcaagtttcctcggtggcgtgctcggggacaggctctgcccgaggtggtggccaaataccaggctctgggtgcagagctcaatgtgcttcccttctgcagccagttcatacccatggaggtcattaatgcccccaggcacggctccatcatctaccatccatccctgctacccaggcatcgaggggcttcggccatcaactggaccctcattcatggagataagaaaggaggcttcaccatcttctgggctgatgatggcctggacactggtgaccttctgctgcagaaggagtgtgaggtgcttccagatgacaccgtgagcacgctgtacaatcgtttcctcttcccagagggcatcaaagggatggttcaggctgtgcgactgatcgcagagggtacagccccccgctgcccccagtctgaggaaggagccacctatgagggcattcagaagaaggagacagccaagatcaattgggaccagccagcagaggccattcacaactggatccgtgggaatgacaaggtgccaggtgcctggacagaggcttgtgggcagaagctgacatttttcaactcgacactcaacacttcaggactgtcaacccagggagaagctttacccatcccaggagcccatcgtccaggcgtggtcaccaaagcaggactcatcctctttgggaatgagcatagaatgttgctggtgaagaacatccagctggaagatggcaagatgatgccagcctcccagttcttcaaggggtccgctagcagtgacctggagctgacagaggcggagttggccacggcggaggctgtgcggagctcttggatgcgaatcctgccgaacgtcccagaggtggaagactctacagatttcttcaagtcaggagctgcttctgtagatgttgtgaggctggtggaggaagtgaaggagctgtgtgacgggctggagttagaaaatgaagacgtttacatggccaccacctttagggagtttatccagctcctagtgaggaagctgagaggggaggacgacgagagcgagtgtgtcattaactacgtggaaagggcagtgaacaagctgactctccaaatgccctaccagctcttcataggcggcgagttcgtggacgctgagggctctaagacctacaataccatcaacccaacggatggaagtgtcatctgccaggtgtccctggctcaggtgagcgatgttgacaaggcagtggcagcagcaaaggaagccttcgagaacggactgtggggaaagataaatgctcgtgaccggggccggctcctgtacaggttggcggatgtcatggagcagcaccaggaagagctagccaccattgaggccctggatcgaggtgccgtctacacgctggccctgaagacgcacgtgggcatgtccatccagaccttccggtactttgctggctggtgtgataagatccagggtgccaccatccccatcaaccaggctagacccaaccgcaacctgaccttgaccaagaaggaacctgttggggtctgtggcattgtcatcccctggaactatcccttaatgatgctatcctggaagactgcagcctgcctggcggctgggaacaccgtggtgatcaagcctgcccaggtgaccccactcacagccttgaagtttgccgagctgacactgaaggctggcattcccaagggtgtggtcaacatcctcccaggatctggatccctggttggccagagactctcagaccaccctgatgtgaggaaaatagggttcacaggctccacggaggtggggaaacacatcatgaaaagctgtgctctgagcaacgtgaagaaagtctccctggagctgggtggaaagtcaccccttatcatatttgctgactgcgacctcaacaaggccgtgcagatgggcatgagctccgttttcttcaacaaaggggagaactgcattgcggcaggccggctctttgtggaggagtccatccacaaccagtttgtgcagaaagtggtggaggaggtggagaagatgaaaatcggcaatcccctggagagggacaccaatcatggcccgcagaaccatgaggcccacctgaggaagctagtggagtattgccaacgtggtgtgaaggaaggggccacactggtctgtggtgggaaccaagtcccaaggccaggattcttctttcagccaaccgtcttcacagacgtagaggaccacatgtacatcgctaaggaggagtcctttgggcccatcatgatcatctctcggtttgctgatggggatgtggatgctgtgctgtcccgggccaatgccacagaatttggcctggcctctggggtcttcacccgcgatatcaacaaggccctgtatgtcagtgacaaactgcaggcaggcactgtgttcatcaacacgtataacaagactgatgtggccgcaccttttggaggattcaagcaatctggatttggcaaagacctgggagaggcagccctgaatgagtacctgcggatcaagactgtgacttttgagtactgaagccaagtctgtgatatttctcctgtaccctgttgcctcccctcagggagccctggcccctgtctggtgtcttagcaccctcctgtccccaacactgttcccttcagctgctggagctatcagtgtggacccctgctggtgacaggacacctccggacaattggaagtggttccaagtggagtgagcagtcatgtcccggatgaataaaggttgtgagcagaagtcacctgcaaaaaa

SEQ ID NO: 427 - DNA, 4190 bp, Homo sapiens
ttcaagatcctgtacaatgggcagagcgtggaggtggatgggcactccatgcggaagctgattgcagacctgcaacccaacacggagtactccttcgtcctgatgaaccgcggcagcagcgctgggggcctacagcacctggtgtccatccgcactgccccagacctcctgcctcagaagccactgcctgcctctgcctttatagaggatggccgcttctccctctccatgcctcaagtgcaggacccctcgctagtcaggtggttctacattgtggtggtgcccattgaccgtgtgggcgggaacctgctggcaccaagatggagcacaccagaggagctggagctggacgagcttctggaggccatcgagcagggtgaggagaaacagcggaggcgtcggcgccaagcagagcggctgaagccttacgtggcagctcaagtggacgagctccctgagaccttcaccctgggggacaagaagaactaccgtggcttctacaaccggcccctgtctccggatctgagttaccagtgctttgtgctcgcctccctcaaggaacccatggaccagaagcgctatgcctccagcccctactcggacgagatcgtagtccaggtgacaccagcccagcagcaggaggagcccgagatgctgtgggtgacaggccctgtcctggcagtcattctcatcatactcattgtcatcgctatcctcctattcaagaggaagagaacacattccccatcgtcaaaggatgagcagtcaatcgggctgaaggactccctgttggcccactcttctgaccctgtggaaatgcgaaggcttaactaccagaccccaggtatgcgagaccacccgcccatccccatcactgacctggcagacaatattgaacgtctcaaagccaatgatgggctcaagttctcccaggagtatgagtccattgaccctggacagcagttcacgtgggagaattccaactcagaggtgaacaagcccaagaaccgctatgcaaacgtcattgcctatgaccactctcgagtcctcctcacctccattgatggtgttcctgggagtgactacatcaatgccaactacattgatggctaccgaaagcagaatgcctacatcgccacacagggtccgctgcctgagaccatgggtgatttctggaggatggtgtgggaacagcgtacagccacagtggtcatgatgaccaggctagaggagaaatcccgggtgaagtgtgatcagtattggccagcccgtggcactgagacctatggcctcattcaggtgaccctggtggacactgtggagttggccacgtacaccatgcgcaccttcgcactccataagagcggctccagtgagaagcgtgagctgcgtcagttccagttcatggcctggccagaccatggggttcctgagtaccccactcccatcttggccttcctgagacgggtcaaggcctgtaacccgctagatgcaggacccatggtggtgcattgcagtgctggtgtgggccgcacgggctgcttcattgtcatcgacgcaatgctggagcgtatgaagcacgagaagacagttgacatctatggccacgtgacgtgcatgcgctcgcaaaggaactacatggtgcagacagaggaccagtatgtgttcatccacgaggcactgttagaggctgccatgtgcggacacactgaggtgcttgctcgaaacctctatgcccacatccagaagctaggccaagtgcctcccggggagagtgtcactgccatggagcttgagttcaagttgctggccaactccaaggcccacacgtctcgcttcattagtgccaacctgccctgcaacaagttcaagaaccgcctggtgaacatcatgccctatgagctgactcgagtgtgcctgcaacccatccgtggtgtggagggctctgactacatcaatgccagctttctagatggctacagacagcagaaggcctacatagctacacaggggcctctggccgagagcaccgaggacttctggcgcatgttatgggagcacaattccaccatcatcgtcatgctgacgaagcttcgggagatgggcagggagaaatgtcaccagtactggccagcagagcgctctgctcgctatcaatactttgtcgttgacccgatggctgagtacaacatgccccagtatatcctgcgtgaattcaaagtcacagatgcccgggatgggcagtcaaggacaatccgacagttccagtttacagactggccagagcaaggagtacccaagacgggggaaggcttcatcgacttcatcgggcaggtgcacaagacaaaggagcagtttggacaggatgggcccatcacagtacactgcagtgctggtgtgggccgcacaggggtgtttatcaccctgagcattgtcctggagcgcatgcggtacgagggcgtggttgacatgttccagaccgtgaagaccctccgcacacagcgccctgcaatggtgcagacagaggaccaataccagctgtgctaccgtgcggccctggaatacctcggcagctttgatcactatgcaacgtaactactgctcccctctcctccgccgctcccctgaggggctccggaggggacccagctcctctgagccataccgaccatcgtccagccctcctgcacggatgctgttgccggcagagcacagcccactgggatcacagcatttcgggaacattgccacaccagtcagagagcccagaacacctgggcaagtaggcggactggcagcctggctctgggccctcgtccaccgggcccaagtggagccctgcttcaagctctctgttcagctccgcgattctcatgcttctcatggggtgggaaagggggcagagccccccacgttttatacatttaggcggggtagactgcggggtcctagcctcttcctccgactttccttttgcaggtctttcactacagattgggctgctgtgggagttgggacttacttgttttcctttttgagttcacgttggatccttgtacaacttctgcggaaggacacagtacacgctttccttcctcgagcagagctagggccctacctgagcaagtcggctgtggcccgggaggcagctgagactcctgctgtcctccagcctttcagaggagatcctattccagccaaatgcagggaaacactttattttgttttaggttttgtttttccttgagagcctttttttaggccccacagacagtggtgggcggggaggcgataggaaacacatccccagtgtgcatttaacattcatagcctacaaccacagacgtgtctggggggagcctggcaaggcgttcctcgtcaccatcgtgtttgcaaaggttcaaaaaagcaaaaattaaaaaaaaaaaaacataaaaatatttttttttaaaaaaaagaaataaagattcatcccctggcctctccttctgctccgaagtgggaggcaactcaatgtgcctggggctcgttgtgggcccacagagtcttgctgtcatccccagcggtgcagtgtggcaggtgtttgtaagctgtgggttctggccacctcggtaactgaatggcacaggtgagggcctgtgccacgccccacacacctcagggccaagcgggggcgtggccggcccttcaggtctagccagtgggcctggtagcacatgtctgtcctcagcgggacagatgctttctctcctggtttgcagctgtcttcaaatcccccatgactcgcccttcccactccttcaagtcgccctcacaaaccaatgtggcaagactactggacttgtatccatggtactctactcagtcctcttatctcagcttgctgaggggcagggagagggtctcttcctctgggcagcactatctaggtagtaagtgggggcgggaaagggtgcatagctgttttagccgaaggactcgatgtggacgtcctcagatatagctaggctaagcggagatcgacggtccggggttggtggtgttggatgagacattcatttttaccttgtggacgctagtgctgtagagttcactgttgtacacagtctgttttctatttgttaaggaaaactacagcatcattgcatacttcttgatggtaataaatttgaataatcagatttcttaca

SEQ ID NO: 428 - DNA, 2515 bp, Homo sapiens
cgatcgctgggcggagaaggcaccgcggtccgcagacccgctgcgggccgggcacagccgggcacccccggccccgcgcctgctcctcccagcgctcccgcgccagccgggccaggcgcgcctgacgtggaccattaaacttggagctgccgcctcgtcccctctctcctcctcctcctcctcctccttctgacaggcgagcgagccgctgggtgcaggcaggcgacgtgctgccgggctaggctgcccgggggagatgacttctcgccaggaggacgcctctggaaagaagaccacggagggagcaaagtttcagggtagctgaggtgccttggtcgcagcccttccgagcccaatctcctccctggctatggagggcggactttaaaatgaatcccgatctggacaccggccacaacacatcagcacctgcccactggggagagttgaaagatgacaacttcactggccccaaccagacctcgagcaactccacactgccccagctggacgtcaccagggccatctctgtgggcctggtgctgggcgccttcatcctctttgccatcgtgggcaacatcttggtcatcctgtcggtggcctgcaaccggcacctgcggacgcccaccaactactttatcgtcaacctggccattgctgacctgctgttgagtttcacagtactgcccttctccgctaccctagaagtgcttggctactgggtgctggggcgcatcttctgtgacatctgggcagcggtagatgtcctgtgctgtacggcctccatcctgagcctatgtgccatctccattgaccgctacattggggtgcgatactctctgcagtaccccacgctggtcacccgcaggaaggccatcttggcgctcctcagtgtgtgggtcttgtccacggtcatctccatcgggcctctccttggatggaaagaacctgcgcccaatgatgacaaagaatgtggggtcaccgaagaacccttctacgccctcttttcctccctgggctccttctacatcccgctcgcggtcatcctggtcatgtactgccgggtctacatcgtggccaagaggaccaccaagaatctggaggcgggagtcatgaaggaaatgtccaactccaaggagctgaccctgaggatccactccaagaactttcatgaggacaccctcagcagtaccaaggccaagggccacaaccccaggagttccatagctgtcaaactttttaagttctccagggaaaagaaagcagccaaaaccttgggcattgtagtcggaatgttcatcttatgttggctccccttcttcatcgctctcccgcttggctccctgttctccaccctaaagcccccggacgccgtgttcaaggtggtgttctggctgggctacttcaacagctgcctcaatcccatcatctacccgtgctccagcaaggagttcaagcgcgccttcatgcgtatccttgggtgccagtgccgcggtggccgccgccgccgccgccgtcgccgtctaggcggctgcgcttacacctaccggccgtggacccgcggcggctcgctggagagatcacagtcgcggaaggactctctggatgacagcggcagctgcatgagcggcagccagaggaccctgccctcggcgtcgcccagcccgggctacctgggtcgaggaacgcagccacccgtggagctgtgcgccttccccgagtggaaacccggggcgctgctcagcttgccagagcctcctggccgccgcggccgtctcgactctgggccactcttcaccttcaagctcctgggcgatcctgagagcccgggaaccgaaggcgacaccagcaacgggggctgcgacaccacgaccgacctggccaacgggcagcccggcttcaagagcaacatgcccctggcgcccgggcacttttagggtcccttttcatcctccccctcaacacactcacacatcggggtgggggagaacaccatcgtaggggcgggagggcgcgtggggggagtgtcagccctaggtagacacagggtcgcaaggggacaaggggggaggggggcggggagaggggcagctgcttttctggcaggggcatgggtgccaggtacagcgaagagctgggctgagcatgctgagagcgtggggggcccccccgacgccggccgggacttaagtctctctctcttctctctctgtatatacataaaatgagttcctctattcgtatttatctgtgggtacacgtgcgtgtgtctgttcggtgtacgtgtgggctgcatgggtgtgagtgtgaggcctgcccgcacgcgcgtgccggggcagagcgagtgcgccccctggtgacgtccaggtgtgttgtttgtctcttgactttgtacctctcaagcccctccctgttctctagtcaatgctggcactttgataggatcggaaaacaagtcagatattaaagatcatttctcctgtgaaaaaaaaaaaaaaaaaaaaaaaaaaaaaaa

SEQ ID NO: 429 - DNA, 1714 bp, Homo sapiens
tcttggttttggggcttcaggctacaatccattgtgcaccacataacagctctgaaggcaaagtaacgacctgtcatttgccccaacaaaatgccactctctataagatgccatctatcaatgctgattttgccttcaggctgtatcggaagctctctgtggagaacccagatttgaacatcttcttctcccctgtgagcatatctgctgctttagccatgctttcttttggatctggctctagcacccaaacacagattctggaggtcttggggtttaacctcacagacactcctgtgaaagaattacaacagggcttccagcatttgatctgttcattgaatttccccaataatgaactggaattgcagatgggaaatgcagtttttattgggcaacagctgaaaccactggcaaagtttttggatgatgtcaagaccctctatgaaactgaagtcttttctactgacttctccaatgtttctgcagcccagcatgagatcaacagttatgtggagaagcaaaccaaagggaaaattgtaggcttaattcaagacctcaaactgaacattatcatgattctggtgaactatattcatttcaaagcccagtgggcaaatccttttcgtgtatctaaaacagaagagagttccaacttctcagtggacaagagcaccacagtacaagtgcccatgatgcaccagctagaacaatactatcattacgtggatgtggagctgaattgtacagtacttcaaatggactatagtgcaaatgccctggcactttttgtccttccgaaggaagggcacatggaatgggtggaagcagccatgtcatctaaaacactgaagaagtggaaccatttattgcagaaaggatgggttgaattgtttgttccaaagttttccatttctgccacatatgaccttggaagtacacttcagaagatgggtatgagggatgcctttgctgaaagtgctgactttcctggaatcacaaaagacaatggtctaaaactttcctatgcttttcacaaggctgtgctacacattggtgaagagggaactaaagaaggagcttctcctgaagctggatctctggatcagccagaagtagctcctcttcacgctgtcatccgattggatagaacattcttactgatgatcttagagaaacgaacaagaagtgttctctttttagggaaagttgttgacccaacaaaagagtaattaacgaagaggtcattgagtatgtatatattataattggaaataaatgtattgcatagcttaatatttgctatggacttgaactttatttcttttgtgcaagtgataaaagtagacattctcaggagtacagtgactgtggaagaggctaatcctgtgaccaaacatgcagatagtcaatgagtgattgttatccaaaactaaaatggattgatgtcagtacatcattgtaaagctgctaatcagttagctaagtctagaaattttgcctgggattacaaatgcctttggatgtatcttttggacaatagttgcaatataggtcaagtctttatattacagtatttcaatagtagtattggtgaacgtgtaaatgaagtgacttgtatatcatcttcacaataacccctgccttttttacctgttcaaaataagtctgtgatgttggctactgctagatttcttttaataaaatttctttc

SEQ ID NO: 430 - DNA, 2256 bp, Homo sapiens
cgagagccggacgggcactgggcgactctgtgcctcgcggaggaaaatcaactaaacatgggcaaaggagatcctaagaagccgagaggcaaaatgtcctcatatgcattctttgtgcaaacctgccgggaggagcacaagaagaagcacccggatgcttctgtcaacttctcagagttctccaagaagtgctcagagaggtggaagaccatgtctgctaaagaaaaggggaaatttgaagatatggcaaaggctgacaaggctcgttatgaaagagaaatgaaaacctacatcccccccaaaggggagaccaaaaagaagttcaaggaccccaatgcccccaagaggcctccttcggccttcttcttgttctgttctgagtaccgcccaaaaatcaaaggcgagcatcctggcttatccattggtgatgttgcgaagaaactaggagagatgtggaacaacactgctgcggatgacaagcagccctatgaaaagaaggccgccaagctgaaggagaagtatgagaaggatattgctgcctacagagctaaaggaaaacctgatgcagcgaaaaagggggtggtcaaggctgagaagagcaagaaaaagaaggaagaggaagacgacgaggaggatgaagaggatgaggaagaggaggaagaggaggaagacgaagatgaagaagaagatgatgatgatgaataagttggttctagcgcagtttttttttcttgtctataaagcatttaacccccctgtacacaactcactccttttaaagaaaaaaattgaaatgtaaggctgtgtaagatttgtttttaaactgtacagtgtctttttttgtatagttaacacactaccgaatgtgtctttagctagccctgtcctggtggtattttcaatagccactaaccttgcctggtacagtctgggggttgtaaattggcatggaaattaaagcaggttcttgttggtgcacagcacaaattagttatatatggggacagtagtttggtttttggtttctttttttttttttttttggttttgttttttttccttttgttttttttttccatcttcagttgtctctgatgcagcttatacgaaggtaattgttgttctgttaactgaataccactctgtaattgcaaaaaaatggcggctgttttgttgacattctgaatgcttctaagtaaatacaattttttttattagtactgttgtccttttcataggtctgaaagttttcttctcaaggggaagctagtcttttgcttttgcccattttgggtcacatggattattagtgtgtatcttcatatagttggaaaaatcttttgtccacacaccctgcatattgtggtaggggtaacattttcatctacagttgaagaattctccaaaattgtgatcagttggataagagatactctacttagcaaagcaaggagtgatcaattctgtcacaccatgggattattagatcaaacagtctgaaagtctgtccttgaaggactaatagaaaagtatgttctgctccttacctgaggactcctttaactgccattactgtgtaatgacagttatattttgcagtttcccctactaaagacctgagaatgtatccccaaaagcgtgagcttaaaatacaagattgctgtactatttgttgaccttagtcccagcgaaggctatcatgagaagctggctgtaatgcctttgcccttctatctaaatacggattgctcaggaaacttgactgtttaaaggtatatttaattagttgagccagcttttaaaattatgccacatttaaaatgaagggtatattttcctatattgtggtttgtccctttataaatcagatacaaggaaagcggataaactttgcatattagtaccagttgtccaagccatttgctttttctttataaagcccgaactcattcattaatcatgtttaatctgcttagtttagggaacaatttggcaattttgtgggttttctttttttctttttcttttttttttttttttgagattatcattctcttaaagtgccagtgttttaaaatagcgttcttgtaattttccgcgcttttgtgatggagtgctgttatatcattttgacttgggttctttacagttgcctttgttctgtaatttgaggaggaatactgaacatgagtcctggatgatactaataaactaataattgcagaggttttaaaaaaaaaaaaaaaaaaaaaaaaa

SEQ ID NO: 431 - DNA, 1200 bp, Homo sapiens
catgagcgccgctcttttcagcctagacagcccagcacgcggcgcaccctggcccacagagcccgcggccttctacgagccaggcagggtgggcaagccaggacgagggccggagcctggggatctgggggagccgggctccacgacccctgccatgtatgacgacgagagcgccatcgacttcagcgcctacattgattccatggctgccgtgcccaccctagagttgtgccacgacgagatcttcgccgacctcttcaacagcaatcacaaagcggccggcgcgggcagcctggagctgctgcagggcggccctacgcgacccccgggtgtggggtcaatcgccaggggcccgctgaagcgcgaacccgactggggcgacggcgacgcgccgggctccctgctgccggcgcaagtggcagtgtgcgcgcagacagtggtgagcttggcggccgcggcacagcccacaccacccacttcgcccgagcctcctcgaggcagccctggaccgagccttgcgcctggccccgtccgagagaagggcgccggcaagaggggtccggaccggggcagccctgagtaccggcagcgacgcgagcgcaacaacatcgctgtgcgcaagagccgggacaaggccaagcgccgcaaccaggagatgcagcagaagctggtggagctgtcggccgagaacgagaagctgcatcagcgtgtggagcagctcacccgggacctggccagcctccggcagttcttcaaagagctgcccagcccgcctttcctgccgcccaccggcaccgactgccggtaacgcgcggtgtgggccttagagactccgaacgaccgatacctcagaccccgacggcggggagcagacgccgcccgaattgctacagtttcttgggcactggactgcgagagaagctatatgaatcccccttaaattatttttttataatggtagcgttttctacgtcttattaccattgcagctaaggtacattgtagaaaagacttttccgacagacttttgtagataagaggaagagactgcgcatgctttttatattcatttttacagtatttgtaagaataaagaagcatttaaattgcaaaaaaaaagaggcaccagctctgactggcctctttctaggctacggtgatcctgagcatcttttgttacctgctggtagaaatgatcct

SEQ ID NO: 432 - DNA, 2977 bp, Homo sapiens; identical to SEQ ID NO: 177

SEQ ID NO: 433 - DNA, 426 bp, Homo sapiens
atggcctacctgctccatgctcaactatttctactgactacctttatattagttttgaacatgagactttgtcctgttctaggtcactttctgggtggcatagagaagtctagcatggaggaggaaggagcctcagaagcattgaactatgctgtcaatgagtataatgaaaagaacagtgacttgtacctgagccgtgtggtggaagtgaaggatgtccaaaagcaggtggtggctggaaccaaatttttctttgatgtgattctaggcaaaacaatatgtttgaagacacagggtgacttgaccaactgtcccttaaatgaagaggctgatcagcaggagcatgaattctgctctttcgtggttcatgatatcccatgggagaattatattgtcttgctgagctccagctgtcatagtatatga

SEQ ID NO: 434 - DNA, 9136 bp, Homo sapiens
agagacggcagcagcgtcccgtccagttcgcctgccgcgctcgcttgtcgtctgcctccagatcccagacagagaagagccatggaggaggtggtgatagccggtatgtccgggaaattgcccgagtcagagaacctgcaggagttctgggccaacctcattggcggtgtggacatggtcacagacgatgacaggaggtggaaggctgggctctatgggttgcctaagcggtctggaaagctgaaggatctgtccaagttcgacgcctccttttttggggtccaccccaagcaggcacacacaatggacccgcagctccggctgctgctggaagtcagctatgaagctattgtggacggaggtatcaacccggcctcactccgaggaacaaacactggtgtctgggtgggtgtgagtggttccgaggcgtcggaggccctgagcagagatcctgagactcttctgggctacagcatggtgggctgccagagagcaatgatggccaaccggctctctttcttcttcgacttcaaaggacccagcattgccctggacacagcctgctcctctagcctactggcactacagaatgcctatcaggctatccgcagtggggagtgccctgctgccattgtgggcgggatcaacctgctgctaaagcctaacacctctgtgcagttcatgaagctaggcatgctcagccccgatggcacctgcagatcctttgatgattcagggaacgggtattgccgtgctgaggctgtcgtggcagttctgctgactaagaagtccttggctcggcgagtctatgccactattctgaatgccgggacgaacacagatggctgcaaggagcaaggcgtgacattcccctctggagaagcccaggaacaactcatccgttctctgtatcagccgggcggtgtggcccccgagtctcttgaatatattgaagcccatggcacgggcaccaaggtgggggacccccaggaactgaacggcattactcggtccctgtgtgctttccgccagagccctttgttaattggctccaccaaatccaacatgggacaccctgagcctgcctcggggcttgcagccctgaccaaggtgctgttatccctagaaaatggggtttgggcccccaacctgcatttccacaaccccaaccctgaaatcccagcacttcttgatgggcggctgcaggtggtcgataggcccctgcctgttcgtggtggcatcgtgggcatcaactcgtttggcttcggaggtgccaatgttcacgtcatcctccagcccaacacacagcaggccccagcacctgccccacatgctgccctaccgcatttgctgcatgccagtggacggaccatggaggcagtgcagggcctgctggaacagggccgccagcacagtcaggacttggcctttgtgagcatgctcaatgacattgcagcaacccctacagcagccatgcccttcagaggttacactgtgttaggtgttgagggccatgtccaggaagtgcagcaagtgcctgccagccagcgcccactctggttcatctgctcagggatgggcacacagtggcgtggaatggggctgagccttatgcgcctggacagtttccgtgagtccatcctgcgctctgatgaggctctgaagcccttgggagtcaaagtgtcagacctgctgctgagcactgatgagcacacctttgatgacatcgtgcattcctttgtgagcctcaccgccatccagattgccctcatcgacctgctgacgtctatggggctgaaacctgatggcatcattgggcactccttgggagaggttgcctgtggctatgcagatggctgtctctcccagagagaggctgtgcttgcagcctactggagaggccagtgcattaaggatgccaaccttccggctggatccatggcagctgttggtttgtcctgggaagaatgtaaacaacgctgccctcctggtgtggtgcctgcctgccacaactctgaggacactgtgaccatctctggacctcaggctgcagtgaatgaatttgtggagcagctaaagcaagagggcgtgtttgccaaggaggtgcgaacaggtggcctggccttccactcctacttcatggaaggaattgcccccacgctgctgcaggctctcaagaaggtgatccgggagccacggccacgctcagcacgctggctcagcacctctatccctgaggcccagtggcagagcagcctggcccgcacatcttctgctgagtacaacgtcaacaacctggtgagccctgtgctcttccaggaagcactgtggcacgtccccgagcacgccgtggtgctggagattgcaccccatgcactgttgcaggctgtcctgaagcgaggcgtgaagcctagctgcaccatcatccccttgatgaagagggaccataaagataacttggagttcttcctcaccaacctcggcaaggtgcacctcacaggcatcgacatcaaccctaatgccttgttcccacctgtggaattcccggttccccgagggactcctctcatctcccctcacatcaagtgggaccacagtcagacttgggatatcccagttgctgaagacttccccaacggttccagctcctcctcagctacagtctacaacattgacgccagttccgagtcatctgaccactacctggtcgaccactgcattgacggccgtgtcctcttccctggcactggctacctgtacctggtgtggaagacactggctcgaagcctgagcttgtccctagaagagacccctgtggtgtttgagaacgtgacatttcatcaggccaccatcctgcccaggacaggaaccgtgcctctggaggtgcggctgctagaggcctcacatgcatttgaggtgtctgacagtggcaacctgatagtgagcgggaaagtgtaccagtgggaagaccctgactccaagttattcgaccacccagaagtcccgatccccgccgagtccgagtctgtctcccgcttgacgcagggagaagtatacaaggagctgcggctacgtggctatgactatggccctcatttccagggcgtctatgaggccaccctcgaaggtgagcaaggcaagctgctctggaaagacaactgggtgaccttcatggacacaatgctgcagatatccatcctgggcttcagcaagcagagtctgcagctacccacccgtgtgactgccatctatattgaccctgcaacccacctgcagaaggtgtacatgctggagggagacactcaagtggctgacgtgaccacgagccgctgtctgggcgtgaccgtctctggtggtgtctacatttcgagactacagacaacagcaacctcacggcggcagcaggaacagctggtccccaccctggagaagtttgtcttcacaccccatgtggagcctgagtgcctgtctgagagtgctatcctgcagaaagagctgcagctgtgcaagggtctggcaaaggctctgcagaccaaggccacccagcaagggctgaagatgacagtgcctgggctagaggaccttccccagcatggactgcctcgactcttggctgctgcctgccagctgcagctcaacgggaacctgcaactggagttaggtgaggtactggctcgagagaggctcctgctgccagaagaccctctgatcagtggcctccttaactcccaggccctcaaggcctgcatagacacagccctggagaacctgtctactctcaagatgaaggtggtggaggtgctggctggagaaggccacttgtattcccacatctcagcactgctcaacacccagcctatgctgcaactggagtatacagccaccgaccggcacccccaggccctgaaggatgttcagaccaagctgcagcagcatgatgtagcacagggccagtgggacccttctggtcctgctcctaccaacctgggtgctcttgaccttgtggtgtgcaactgtgcgttagccaccctgggggatccagccctggccctggacaacatggtagctgccctcaaggatggtggtttcctgctaatgcacacagtgctcaaaggacatgcccttggggaaaccctggcctgcctcccttctgaggtgcagcctgggcccagcttcttaagccaggaagagtgggagagcctgttctcaaggaaggcactgcacctggtgggccttaaaaagtcattctacggtactgcgctgttcctgtgccgccgtctcagcccacaggacaagcccatcttcctgcctgtggaggatactagtttccagtgggtggactctctgaagagcattctggccacatcctcctcccagcctgtgtggctaacagccatgaactgccccacctcaggtgtggtaggcttggtgaactgtctccgaaaagagccgggtggacaccggattcggtgtatcctgctgtccaacctcagcagcacatctcacgtccccaagctggaccctggctcttcagagctacagaaggtgctagagagtgatctggtgatgaacgtgtacagggacggtgcctggggtgccttccgtcacttccagttagagcaggacaagcccgaggagcagacagcacatgcctttgtaaacgtccttacccgaggggaccttgcctccatccgctgggtctcttctcccctgaaacacatgcagccgccctcgagctcaggagcacagctctgcactgtctactatgcctcactgaacttccgagatatcatgctggccacgggcaagctgtcccctgatgccattccaggtaaatgggccagccgggactgcatgcttggcatggagttctcaggccgtgataagtgcggccggcgtgtgatggggctggtacccgcagaaggcctggccacctcagtcctgttatcacccgacttcctctgggatgtaccctctagctggaccctggaggaggcggcttctgtgcctgttgtctacaccaccgcctactactccttagtagtgcgtggtcgtattcagcacggggaaactgtgctcattcactcgggctccggtggtgtgggccaagcggccatttccattgcccttagcctgggctgccgagtcttcaccactgtgggctccgctgagaagcgagcttacctccaggccagattccctcagctggatgacaccagctttgctaactctcgagacacatcgtttgagcagcatgtgttactgcacacaggtggcaaaggggtggacctggtcctcaactccctggcagaagagaagctgcaggccagtgtgcggtgcttggctcagcatggccgcttcctagagatcggcaaatttgatctttctaacaaccaccctctgggcatggccatcttcttgaagaacgtcactttccatgggatcctgctggatgcactttttgagggggccaacgacagctggcgggaggtggcagagctgctgaaggccggcatccgtgatggggttgtgaagcctctcaagtgtacagtgtttcccaaggcccaggtggaggacgccttccgatacatggctcaaggaaaacatattggcaaagtccttgtccaggtacgggaggaggagcccgaggctatgctgccaggggctcagcccaccctgatttccgccatctccaagaccttctgcccagagcataagagttacatcatcactggtggcctaggtggctttggcctggaactggcccggtggcttgtgcttcgtggggcccaaaggcttgtactaacttcccgatctggaatccgcacaggctaccaagccaagcacgttcgggagtggaggcgccagggcatccatgtgctagtgtcgacaagcaatgtcagttcactggagggggcccgtgctctcatcgctgaagccacaaagcttgggcccgttggaggtgtcttcaacctggccatggttttaagggatgccatgctggagaaccagactccagaactcttccaggatgtcaacaagcccaagtacaatggcaccctgaaccttgacagggcgacccgggaagcctgtcctgagctggactactttgtggccttctcctctgtaagctgcgggcgtggtaatgctggccaatccaactatggcttcgccaactctaccatggagcgtatttgcgaacagcgccggcacgatggcctcccaggtcttgccgtgcaatggggtgccattggtgacgtgggcattatcttggaagcgatgggtaccaatgacacagtcgttggcggcacactgccacagcgcatctcctcctgcatggaggtgctggacctcttcctgaatcagccccacgcagtcctgagcagttttgtgctggttgagaagaaagctgtggcccatggtgatggtgaagcccagagggatctggtgaaagcagtggcacacatcctaggcatccgcgacctcgcagggattaacctggacagctcgctggcagacctcggcctggactcgctcatgggtgtggaagtgcgccagatcctggaacgtgaacatgatctggtgctacccattcgtgaagtacggcaactcacactgcggaagcttcaggaaatgtcctccaaggctggctcagacactgagttggcagcccccaagtccaagaatgatacatccctgaagcaggcccagctgaatctgagtatcctgctggtgaaccctgagggccctaccttaacacgactcaactcagtgcagagctctgagcggcctctgttcctggtgcaccccattgaaggttccatcactgtgttccacagcctggctgccaagctcagtgtgcccacctacggtctgcagtgcacccaagcggcccccctggacagcattccaaacctggctgcctactacattgattgcatcaagcaggtgcagcctgaggggccccaccgagtggctgggtattcttttggagcttgtgtagccttcgagatgtgctcccagctgcaggcccagcagggcccagcccccgcccacaacaacctcttcttgtttgatggctcacacacctacgtattggcgtacacccagagctaccgggcaaagctgaccccaggctgtgaggctgaggctgaagctgaagccatatgcttcttcattaagcagtttgttgatgcagagcatagcaaggtgctagaggccctgctaccactgaagagcctggaggaccgggttgctgctgctgtggacctcatcactagaagccaccagagcctggaccgccgtgacctgagctttgctgccgtgtccttctactacaagcttcgagccgccgaccagtataaacccaaggccaagtaccacggcaatgtgatcctgctgcgggccaagacaggtggcacctacggcgaggacttgggtgccgattacaacctgtcccaggtgtgtgatgggaaggtgtctgtgcacatcattgagggtgaccatcgtacgctgctggagggcaggggcctggagtctatcatcaacatcatccacagctccctggctgagcctcgagtgagtgtacgggagggctagacctgcctaccatgaagccacgacccacaccggccaccagagatgctccgatccccatcacaccctgagtgcagggactggggagggtcctgctggtgggaccccctcaccccagtggcccagcaccaccccctcccctggtggctgctacaaacaggaccatcacatgtgtcccagccacttagtggggttcccagagccactgacttggaggcaccctggtctgtgaagagtcagtggaggccagcaagagccaaactgagccttttctgccaagtgacatttgtcacactggttgtttctccattaaattctcatatttattgcattgctgggaaagaccgcccaccccagggttaactcattccagaacccctaaagtgggaaaagccatgtggggaaggctgctggctggagcccctttttgtcttagccctgtacccgctcactgcagggcagggtatggagagggctggttcccggggaacgaggaccccagcagacactgtagcccatggcccttggtccccagcactcccggctgcacccatgatgcagggcctaccagactctgcggaccgcaccgggcactcactgtatttgttttccaagattcaaattgctgcttgggttttgaatttactgcagctgtcagtgtaaagaaacatgtctgaactgtgtcctttttacaccaacctggtaaaaatgctcttgatgctgtcccgttgccacaattaaactgcacgtgagctctggcttccgttcagtctctttccagtcccagacctgagtccccagagcctccacagctcttacagtgagaatcaaattggcccactccttggaaggcgtggcattctgtcagagtaaaaggaaagtagagtgtgctgattcacgttcagcgtgtggggctggctagagaccttggcactgtagtgaacagaatgtgtccacctttaagtcaccctgaaggcatcaccatagctacagcctcacccaggggtagagaatagtactgtctacttgttgactacctggcagttggtgccagcccctatagaggaaaacagcagtgtgtggccactgtgagaagcatatccctggaaacaggtgaccagagcagagggctaatgcctacctgagtcacacaaaactgaccaggcttgagtgtccagaagagtctatcagaaggccacagcattcagtcctatccacagagagcagcagactaagttgtctccttgccagcttagaaaactgcagtgctggggtacaggtagggtgttcaggaggtccgggccccagtgattagtctaagactgaagcatctggttggctgtggtcccacctagaaaattcttaaagctcttgtcatgtacttcctgggaaggacctaccctgtctcaataatgtctctagctcgttggagtctactgactcaaacatttataaagtgtcctagaaaggcctgactcccctacaaggctgtgtgatccttcaaactcacatatgtgagccaataaaaccttgagactct

SEQ ID NO: 435 - DNA, 485 bp, Homo sapiens
gaattcatttctctactgaaaccttaaagtagtatttggtcattcattgtatgtgtcttatatacccacccacacacagacacaaaggaaatctatcaaattaatcctgatgtattcgaagtggttattcaattcatttatggcagagcaatatcagtcctaatgactcgtgaaagtgttactaactgaatcattatcttacatttactgtttagtaagcatattttgaaaaatgtatggctagagtgtcataataaaatggtatatctttctttagtaattacattaaaattaatcatgtttgattaactggttcctctgatgtagtgtgtcatttcttaacatatagagaactgtagagcatttttttatttaatggcagtgtttgcaactcacaggcacagaaacactcagactaatcatttatcatagagatatagaacttacaggttaaagtattcacaatgtatgtaagagagttatga

SEQ ID NO: 436 - DNA, 2974 bp, Homo sapiens
gtttccggggcgctgtgcgaaagctagagcaggcgccagagaagacagctcgagctcagaacccgagaccaagcctctctcccggaggcagctcagctcctatcttctctaggcccgctgcagcgtgcgctgggcttcgttttatgcgggtacgagccacgtccccggggaatatgcagcgtgcgtggatcctgctcaccttgggcttgatggcctgtgtgtcggcagagacgagagcagagctgacatctgataaggacatgtaccttgacagcagctccattgaggaagcttcaggattatatcctattgatgatgatgactattcttctgcctctggctcaggagcttatgaagacaaagggagtccagatctgacaacatcccaactgattccaaggatctccctcactagtgctgctcccgaagtggaaaccatgacgttgaagacacaaagcatcacacccactcagaccgagtcacccgaagaaactgacaagaaggagtttgaaatctctgaggcagaagaaaagcaggaccctgctgtaaaaagcacagacgtgtacaccgagaaacattcagacaatctgttcaagcggacggaagttctagcagctgtcattgctggcggtgtgattggctttctctttgccattttcctcatcctgttgttggtgtaccgcatgcggaagaaagacgaaggaagctacgaccttggagaacgcaaaccgtccagcgcagcttaccagaaggcacccactaaggagttttatgcataaaactcccacttagtgtctctatttaagagatcactgaacttttcaaaataaagctttagcatagaataatgaatatctttgttatctgttttgttcattacagagccatgctggccctttaatgatgaagatcccattgtatttaaaatttttcatatatttctttagaatgacttaaaagtaaaaatttaacatctgcagtgttctgtgaatagcagtggcaaaatattttgttacaaaaacccttgacattcatggaattgatttgaacatctatgtgcaaatacaaaatgattgtgtttgtcctctggttcaaagatgactgctgttcccctcatcagcagatctccagttgaccttaccgagttgatctttgttaatttatctcttgttcctcttctctgccctcccttcttgtctcctcccttaaaaacaaaaccttatgccttttgtagctgtcatggtgcaatttgtctttgaatgattacaataatggtaatttagtgtatatgtgatttttttcaattatgtaaactttaacctcctctttatgtaatttttttaaatgtcagactacccattttacacttgctttaatttccattccctgtagcttcaggcagatttgcaaaggcaaattataaaattggattattactacgaaactgttagtcctagttatctaagcagatcttctcttggaggatttgacatcactgacaagcctcagcaaacccaaagatgctaacagtatttgagaagttgctacagactcctttggccactgtacttgctagtttacaatttgaaggtacaaggaagagtttaaaggaaaaaaaagatcagtttttgttcttaaaaatgcatttaagttgtaaacatctttttaagcctttgaagtgcctatgattctatgtaacttgttgcagactggtgttaatgagtatatataacagtttttaaaaagttggtattttataagcacagacaattctaatggtaacttttgtagtcttatgaatagacataaattgtaatttgggaacaagcaaactactgaataaatcacatggcctaatattgaaaatgtcactgttataaattttgtacatttcttatcaaatgtacagcttccctttgctatgactgactgtctgttctcagtgactatgtgggtttgatttccgagtatccatggtgtctgtaagaccaaagagcccctcagttaggctgtttattacaagatttacctctggattggccagaggaaatgtatgcgttatcctgcatgtgtctgggtgcagggatagaatgactgccaggggatttcaaggtttgcaaactgtgtagtgtagctattgacaatattgagacagatgccttcttttgcaatttactcttaaaaagtataaattccaaagaagcaaagggacctttctagaagtagataactggggatcagccctatagaattgcttaactgtcaaagctcccttgcagaagaaccctgtgagtgacaaccacagccactccatgggcctggagggaagggtgtggaggctctgcatgttaaaacgacaacctggctgcttaggatggatgtttctagaaaaagtaatgccagaggaggagatggagggatggggtaccccggttgggtactcactgaacagagcatttcccttttctgttctattttctattttcccattaatttttagttttaaactgtgagccatggaagtagaaagaagacagcaagaactgcaacttttccagcatacagtcaactttcgataaaagtttgactactttgagcaccttccctgggcttgtcacagaactcattcaaacaaaactaaagtaacacttggaacagtgttgtgtctgaatccttaatggccttaatttctgtccaattatagccgtaattcaccttatttagaattaagaggaaatgatgggcccttccaaagctgcacaatgccctcaatcacggaggctgagaatgtagtggttatacctctaactgtgcaaaacagtgaaaccctaattgtagaatgacttgcttggaatatctatgccagggaaaaaatactggcaaatattttgtcactgctgtaaagcaaatttgtttaagtgccaaaataaagtctgtcgtgccgaaagtaaaaaaaaaaaaaaaaaaaaaaaaa

SEQ ID NO: 437 - DNA, 3224 bp, Homo sapiens
ctcaaggggcctctgggttctatttccaaagttctcggtgtgttccgtaatacttacgttacatctctcgggtgtggagctaggaatctccagtaagagagaacatgcgatatttgttgttctggtatggattgcctcactcgtattctcagtgtgtctgtcattggaccccagccagtggcatctttgaaaatgagccattattatctttattgcttctggtcctgggcaagttagtcaccacagaaaagcgcttcctcaaggacagtttgtacaccgaaggaatcctaattgtatgggacccatccgtgtatcatgcagatatcccaaagtggtatcagaaaccagactacaatttcttcgaaacctataagagttaccgaaggctgaaccccagccagccattttatatcctcaagccccagatgccatgggaactgtgggacatcattcaggaaatctctgcagatctgattcagccaaatcccccatcctccggcatgctgggtatcatcatcatgatgacgctgtgtgaccaggtagatatttacgagttcctcccatccaagcgcaagacggacgtgtgctattatcaccaaaagttctttgacagcgcttgcacgatgggtgcctaccacccgctcctcttcgagaagaatatggtgaagcatctcaatgagggaacagatgaagacatttatttgtttgggaaagccaccctttctggcttccggaacattcgttgttgagtacctagccaggcacccttatccttctccatacgtcattttatggctactctcctggttaccgctgcttgaaggagtgtttttattcaacaggcccagcctgcttcctgcgctctagggaattttgttggcaagagttctggggcctccagcctgcctccctggggccaccgaggatgggagtccagattcttgccacactcattcctcctagacagcgtcctcctctccttctgcatgggtagggaaagatccacatttctcaccagggttgcgaaaactagactttgttttctccaactggatgatgtcatcctcgcaaggcagcacgtcctctgtggcttgaactctccctaggtattgatttcacatccgaaagaaattctcccagatcatgatttgtgtttcacagatgcagggtggcgggaggggagaaaaataattggggcaggatggggaagcctactcagttactccagaagggcgtcaaggtgctcccaactcccttgggacatagtcctgttgtcaccctgtctggctaggctgatccttaatgcaaaggaccctgggtgcttatgatttgggtagcccacttccaactccctgtggagatgaaaggtacaaaacctcctgatcacctgaccatctgtctccagcatggacgagagagacacccaacaggcagctaaaatgcaaacattccgtagcctgttgtctgtgtgctcctccctaagacacccaggaggggccagctctactgtgttcttgtagagctgcggcacggaggaagaagggatactggggaagctcttacaccttctgcgtcagaagatctcttttcattttcccctttatgaacactgtatggcctgttacattgatgttatatttggaggcccaaggagtttttgttaggaagtccctaccaccgtcagatgtagacagcaggttaaagtgctgccccacaagactggggttcttattttattttttttaaatgtctacctctcccctactaattgctattgttatcccaaaccttctccagcaggctcccctctcgaattttaatctttttctttaggggcaccccatcaactttccctgaccgtttgacaaatacccgaaaggtctctcagggcatggggagtatgtaataaatgattcttcccttagaatcttaatcattcctgggacttaggggggtgaagtgtgtgatcacagattgccaagcatacccaccctgtttggctctgggcaggaagcactgctcttcctggttccctcacaaggattttctgagatgtggagtggtttacctagcctctgatgaagccacagtgggcttctctaccaggtggcaataacctatggtcaaaactcaaggctggcacaatctgttcgattcaaggctactaagacttaatgctattgaacctgtgttctcacaggcttctgtttactgctgacctagagctcagaaactcagaccccactgtctcagtgtttcaagctgcttgccttattcgggcaatagaaagcccggagtgaaaagccctgggtttccaggttgacctctcacttcctcactgtgccactttgtttctgtatctgtaaaatgggggtgacaatcctacctcacagggctgtgtggggacaacaggaaaacatggctgcgatgtatgagaaccactggaaagcgcgtggctgggctgtgaccacagtgtataggaagtaggtaccctgctgtccttcctgtttccttatgaagaacctaccaggtgatcacacccgtgctgggccttgctacaagggagggcagtggagaggaacaggacattctttctgttgtgagacaactgcatcatttgcaatatgcaggggcctactatcttgttgcctgcaccccaggtctatttgtgctggggttgggggtgcacagagcattgagctgcttggccgctgtgtggaataaatctagagaattcctggctcacttcttctgatctcacacgctcattataaggcattaggactgtggatggagtggccaggaagttgatgttccttctgtcagcaagaggtacattagagatggagactacactgggtagattctagtttttaattcttattaatgtggggggaataaattaataagtataatatgattctgatgtctattagactttctctgtgctctttgtgagtaaggtgggccacggaggtatgagggcatcactgttagtttggtgaggtggttagtgactgatgtacaggaagtgtcttctacgtgggcactgacgtcagtagccatctatgcatcctaaatgcaggatcctcttgattctttctgccaatcaaatatatcgttgctcttggttcaggtttgtgtcagaaactttaaaaacatacctattaattctaaattatccaaagattatgtacaaattttaaaataaatgtctttttcag

SEQ ID NO: 438 - DNA, 3224 bp, Homo sapiens; identical to SEQ ID NO: 437

SEQ ID NO: 439 - DNA, 5120 bp, Homo sapiens
accatcctcatctctcagctgaaagttttcaacatggattcccgtgaattccggagaagagggaaggagatggtggattatatagctgactatctggacggcattgagggacgtccagtgtaccctgacgtggagcctggctaccttcgggccctgatccccaccactgccccccaggagccagaaacatatgaggacataatcagagacattgaaaagataatcatgccaggggtcacacactggcacagcccctacttcttcgcttacttccccacggccagctcctacccagctatgcttgcggacatgctgtgcggggctatcggctgcattggcttctcctgggctgcaagcccagcatgcacagagctggagacagtgatgatggattggctggggaagatgcttgagctgccagaggcctttttggctggaagagctggggaagggggaggagtgatccagggaagtgccagcgaagccaccttggtggccctactggctgctcggactaaaatgatccgccagctgcaggcagcctccccagagctgacacaagctgctctcatggaaaagcttgtcgcttacacatctgatcaggcacattcctccgtagaaagagctggattaattggtggagtcaaaataaaagcaattccttcagatggcaactactccatgagagctgctgcccttcgggaggccctggagagagacaaggcggctggcctgattcctttcttcgtggttgtcaccctaggaaccacatcttgctgctcttttgacaatctcctagaagtgggtcccatctgcaaccaggagggtgtatggctgcacattgatgctgcatacgcaggcagtgcctttatctgtcctgagttccggtatcttctgaatggcgtggagtttgcagattcctttaactttaatccccacaagtggcttttggtgaattttgactgctctgccatgtgggtgaagaagagaactgacctaaccgaagcctttaatatggaccctgtttatctgaggcacagtcaccaggactcaggactcatcactgactacaggcactggcaaatcccactggggcgaagatttcgctccctgaaaatgtggtttgtttttagaatgtacggagtcaaggggctgcaggcttacattcgaaagcacgtgaagctgtctcatgagtttgagtccctggtacgccaggaccctcgctttgaaatttgcacggaagtcatcctcgggttggtctgcttccggctaaagggctccaaccagttgaacgaaactctcttacaaagaataaacagcgccaaaaaaatccacttggttccgtgtcgtctccgagacaagtttgtgctgcgctttgcggtgtgctcccgcactgtggagtctgcccacgtgcagctggcctgggagcacatccgagatctagcgagcagtgtgctgagggcagagaaagagtaaaagcagagccgcttcagagacccaaagttgaaaaaaagtttttccgaaaactgggaagagaaaaataaccacccctccgtcttcgtgaaatcatgcttgtatgtggcgtcatgtgtgtctccaaaattaaccagaaactgctgattgacttttcagtgacttctcaatgaagaaatactttctgcattatccagggaaagtattaatctgtgtggaaattaacaccagtggctctagcttctgttctttgtgtggccgtgatttttgttgataataagatgtctcagtgttcataaagccgtaggtggtagaaaaggcttatagaaatattttctagggtggtttttggtctttcttgccttcagatgatatctctggctgttaacttgtcctctgtgtggctaaatacttaataaacaacccgtgtgcaatactaaccgcgttgagtcagttttacactgtattagactcattctcgtgaacctaactgactctttcagacattttgtcaccatgtgtttagtgagagtctggtatatgtcagtcaccattcagaatcattaacaacacagcacgttctgcttagagttcatgaattcaatttataaaatcattctggttttagaggaatgttatttttggtaggtttatttttaagtgtgtgtgtgtgtgttgctcatggaggccagaagaggccatcagatcctctggagctagagttataggtagttataacccatctaattgtaggtgcgaaaaaccaagtaggttttctagaagagcagtgtgcactctttgctacttagccacctccccagtcccaacatatgtgtatttttgtcctttgaagactttagaattgcagatggcattcccgtgaggtccttgtgttattagcaggtgtggtggttttatattgagtgtcccttgacaggatctagaatcatccaggagacatgcccccagggaatctcgaatttaggttgcctatgattatattgattatgttacttgaggtggtgaaaaacacccctagtgtgggtggcatcattccttgggcctgggtcctagactgtacaaattggacgtaggggttatctaaaaggctggagtatttcgttttaaagttgtctgaatctttagggaatagagtcttagatctcagcttatgtccaaacccaggaagaatacagtcttgtctaaccgtggcttatttttagtcttactaagagcttctactgctgtgataaaacaccatgatcaaaagcaactagggaaggaaagggttgatttgactcacacttccacatcacagcccatcaatgaaagaagtcaaggaagtaattcagggcaggaactgatggttccacacttgtgcaatctgaggaaagtaaatcagtgagcagttcctccatccctctgcttcagaccatgcctctatattcttgctttgagttcctgactagacttcccttgataatggaccgtaagctgtaagaggaaataaactcttttctccccaagttgcctctgatcatggtatttatcacaacaaaaagcagactaggagagagtcttctcaggataggtgacagtgggggacatttgatgcttatgggacaaggtccattttatctgcctgggtaaatcttgccttttattccagctatacattatccacatagaactcagtatttcaaagccaggtgctgcacccctttagtcccagcgcttaaggagccagaagcaggcaggctgatctcttgagttcgaggccaccctggtctataaagtgagttgcagtacagtcaaggctacacagagaaaccttgtcttgaaaaatcaaaaccaaccaaacaaaagagaattgagaacgcctggacgtgtagcacgtgcatttaaatctgtgcttagtgcagttgctcgctggagtacagtgacctctggtggcaatgatgctagatgctgcctgtgtgacctcaggtgtttgcggattgcagacacttctaccgggagttgagaaagccctagacttatcgggacacagcagaaagccaacaaaagacttatcctggaacatctcttgtctgcaatgtagcaaagaacagtcttcctggaactggagacccaagtcaagctgaatacctaccagtcagcatacggaaaagccggagctaggacaaggagctgccaccttgtggcctcatcatcatcttgaggacaagggaaagggatataggagaagaccccaaggaaaggcagggctgaactttgaactagggaatccaatcgatggtataaattgaaaaatgatcttattggtattctacagttgaggaaacatggtgcttaccctatagcgttttggctgaaaggatttctttattgtttttttcataataatataaactcctaaatattaattgttttcactcgtttggtatcaaaatctgtttcccaagcacctctctaggcgtaccataacatacccttgtaaaaagtagtgggaaaaataatacagaatcactagcagcgtaagttgctcgcataaactggtaatatttgaaaaggtctttttaaagaaactcgtgtggttctcaaaagcagacatgcaataaacagttgcaggaagaattatggtatgcccccatcgcctgctcaaaccagaagcagaaggatccacacatggaccagtttttcctaaacacaggaaattcacagcagccagaggccaaaatacctcagcttgattaagtccctctgctctaacctcgcaagaaaagtgggctgaagtaagctgatatcaacctgttaggtcctttccaacagtctcggctccctgctttacggagctggcccttctgttcctgcccagtacaagttctcattctattctgtacagtgaagagggttgcttcactcatgaatataaaggctaaggagaactttgtcagacttgttaaaattctgtctctggttgtaggggagaacaccagctaatgaaaacttttcatcacgactgtacattccattcacgttaggctaccctgtatccaagggatggctggatctccaatcttcactgggtctctttcaccaaggcaggtctgcagtggaaagctgtggccgtcaggagaattccagccatattcagggaatctcagagaaaagagccagatttaattttgtcccatcttctctcctatctctacaacagtctacttctcacactgcctacaaacatattttacaaaacaaaacaaaaaaccaaaatccattattattgtgtgtttgtatgatgggtagaaaaaagcacacacaccaagaggtcaaaggacaactgtgtggaatcgtttttttttttttctccttccacttcttcatgggttctgaaaatcaaactaaggtcaccgggtttgcacagtaaacatctttacctgagatatcttgctagccccccaaatacatttttttttctggaagaggatgcctattacttgggatcattttatttctccgatcaaaacaaattagccaactgaactgtacacaggcattgtctgagattacgtttagaaactcataaacacataaacaataaactctcccaccaaggaaaaaaaaaaaaaaaaaaaaaaaaaaaa

SEQ ID NO: 440 - DNA, 1342 bp, Homo sapiens
gcagccagacgccaggctggatgaaatgaagaaggcaatggcaggcagtggtgccagcctctgaggtgtcgagctgctacctcccaccgctcatctctcacacaatgccatcaaacccctgcaagccacacttcttgccagccacctggcacccgaatctcagggcctcctgcatgctgtttcccttggagaggctgaagagacagagtctagcaggaatcccctccgcttgcgggtaggaagcttggggagcagcctcatggaagagaagcagatcctgtgcgtggggctggtggtgctggacatcatcaatgtggtggacaaatacccagaggaagacacggatcgcaggtgcctatcccagagatggcagcgtggaggcaacgcgtccaactcctgcactgtgctttccttgctcggagcccgctgtgccttcatgggctcgctggcccatggccatgttgccgacttcctggtggccgacttcaggcggaggggtgtggatgtgtctcaagtggcctggcagagccagggagataccccttgctcctgctgcatcgtcaacaactccaatggctcccgtaccattattctctacgacacgaacctgccagatgtgtctgctaaggactttgagaaggtcgatctgacccggttcaagtggatccacattgagggccggaatgcatcggaacaggtaaagatgctacagcggatagaacagtacaatgccacgcagcctctgcagcagaaggtccgggtgtccgtggagatagagaagccccgagaggaactcttccagctgttcggctatggagaggtggtgtttgtcagcaaagatgtggccaagcacctggggttccggtcagcaggggaggccctgaagggcttgtacagtcgtgtgaagaaaggggctacgctcatctgtgcctgggctgaggagggagccgatgccctgggccccgacggccagctgctccactcagatgccttcccaccaccccgagtagtagacactctcggggctggagacaccttcaatgcctctgtcatcttcagcctctccaagggaaacagcatgcaggaggccctgagattcgggtgccaggtggctggcaagaagtgtggcttgcaggggtttgatggcattgtgtgagagatgagcggtgggaggtagcagctcgacacctcagaggctggcaccactgcctgccattgccttcttcatttcatccagcctggcgtctggctgcccagttccctgggccagtgtaggctgtggaacgggtctttctgtctcttctctgcagacacctggagcaaataaatcttcccctgagcc

SEQ ID NO: 441 - DNA, 1182 bp, Homo sapiens
gttcccgggtcgtgctccgcgctcactgcagccaccttcgccgcccaccgtctcctccaacgcggactccggcagctttctcgccagagtcctcgaaactcgactaattccttacgcgtacgaccagaccaccggcgtgccccaccatgtcagacgcggcagtggacaccagctccgagatcaccaccaaggacttgaaggagaagaaggaagttgtggaggaggcagagaatggaagagacgcacctgccaatgggaacgctcaaaatgaggaaaatggggagcaggaggctgacaatgaggtagatgaagaagaggaagaaggtggggaggaagaggaggaggaggaagaaggtgatggtgaggaagaagatggagatgaagatgaggaagctgaggctcctacgggcaagcgggtagctgaggatgatgaggatgatgatgttgagaccaagaagcagaagaagactgatgaggatgactagacagcaaaaggaaaagctaaccttacgcaccgtgacctattcaccctccacttcccgtctcagaatttaaacgtggtcaccttcgagtagagaagcaggcccccgcccgcccactgcgcgagtgccacccaccaatgacatgcgctcttcaccaccccaccaaaaccacaacatgaattggcaacatgggaggagaaaagaaccagaacttcccaggccctgctttttttcttaaaaatactttaaaaggaaaatttgtttgtattttttatttacattttatatttttgtacatattgttaggggtcagccatttttaatgataacgggtgaccaaaccagccttcagagcgttttctgtcctacttcagactttacttgtggtgtgaccatgttcattatactctcaaaggagaaaaaaaaccttgtaaaaaaaacaaaaacaacaacaaaaaaacaatcttattctgagcattccagtaactttttttgtgtatgtacctagctgtactataagtagttggtttgtatgagatggttaaaaaggccaaagataaaaagattttttttcctttttttttgtctatgaagttgctgtttatttttttggcctgtttgatgtatgtgtgaaacaatgtccaacaataaaccggaattttattttgctgagttgttccaaaaaaaaaaaaaggaatcc

SEQ ID NO: 442 - DNA, 1309 bp, Homo sapiens
gaattccgttgctgtcgctagctctctctcttttttttttacagcttaatatttgtggtgcaatttgaagtgaactgaaccgggtgatttcacttctctcacaggagcatctggacagtacaccacttgtgatggagacttctatgcctgaatactatgacgtttttggtgatttccatggatttttaatggataaacggttcaccaaatattgggaagacgttgaaacattcttggcaaggccagatgaccttctcattgttacttatcctaaatctggcagcacatggattagtgaaattgtggatatgatctataaagaaggtgatgtggaaaaatgcaaggaggatgcactttttaacagaatacctgacctggagtgcagaaatgaagatctaataaacggaataaaacaactaaaagaaaaggaatcgcctagaatagtgaaaactcacctgccagctaagctccttccagcatcattttgggaaaagaattgcaagataatctatctttgccgaaatgccaaagatgtcgtcgtttcttattactactttttcctgatcatgaaaagttatccaaatcctaaatctttttctgaatttgtggagaaatttatggaagggcaagttccgtatggttcctggtatgatcatgtaaaatcttggtgggagaagagtaagaattcacgtgttttgtttatgttctatgaggacatgaaagaggatatccgaagagaagttgtgaagctgatagagttcctggagagagacccatcagcagagctagtagacagaatcattcaacatacatcattccaggagatgaagaacaatccatgcaccaattattcaatgctgccagagaccatgatagatctaaaagtatcgcctttcatgagaaagggaattgtaggagactggaagaaccacttccctgaagccctgagggagagatttgaggagcactaccagcagcaaatgaaggactgccctgtgaaatttagagcagagctctgagacaattccttgtgtctgaaattggagtagtctccaatttatccttcagtttttcttgttttgaattcagtagaagtagaagtcttttgaagactgagggtttaaattcattctggtttttttaatctaacttttatatcaatctagtttctgaatgttttgttggcaaaataacatttttcatatatacatatatatacatatatatatatatatatatatatatatatataacacaagcattgtcctctaatagtgttcaaagatttctaataaaaaaaccggaattc

SEQ ID NO: 443 - DNA, 2208 bp, Homo sapiens
gggactggatgatgctgtcccgctggagaggattcgtggcttgagtcctgttccacccgatcaccgatcaccggggtggccgaggccggtaccagcgctgcggctctctcagctctgccacattccctgagttaacatatgagagattggtataaaatggctggcattttgtctggataaatcacacaaccctcccagaaagtgatcaccaggtcaagtggatttcgaatagtgtctgagaccaactcaacccagaaaaacaaaatggcccttaactcttctgctgaagatggtatcaaaagaatccaagatgactgccccaaggctggcaggcacagttacatatttgtcatgatccctaccctctacagcatcatctttgtggtgggaatatttggaaacagcttggtggtgattgtcatttacttttacatgaagctgaagactgtggccagcgtctttcttctcaatctcgccttggctgacttatgctttttgctgactttgcccctgtgggcagtctataccgctatggagtaccgctggcccttcggcaatcacctatgtaagatcgcttcggccagcgtgagcttcaacctctacgccagtgtgttccttctcacgtgtctcagcatcgaccgctacctggccatcgtccacccaatgaagtctcgccttcgccgcacgatgctggtggccaaagtcacctgcatcatcatctggctgatggctggcttggccagtttgccagctgtcatccaccgaaatgtatacttcatcgagaacaccaatatcacagtgtgcgcgtttcattatgagtctcggaattcgacgctccccatagggctgggccttaccaagaatattctgggcttcttgttccctttccttatcattctcaccagctatacccttatttggaaagctctaaagaaggcttatgaaattcaaaagaacaaaccaagaaacgatgacatctttaggataattatggcgattgtgcttttcttcttcttttcctgggtcccccaccaaatattcactttcctggatgtgctgattcagctgggcgtcatccatgactgtaaaatttctgacatcgtggacactgccatgcccatcaccatctgcatagcgtattttaacaactgcctgaaccctctgttctacggctttctggggaagaaatttaaaaagtatttcctccagctcctgaaatatattcccccaaaggccaagtcccactcaagcctgtctacgaaaatgagcacgctttcttaccggccttcggataacatgagctcatcggccaaaaagcctgcgtcttgttttgaggtggagtgacaggttcaaagcacactggcaatgtaatgccctgacagaagccagggcagcctctgactaaatggcttacgaccaaaggaccattcaccctgcctcaggatctaagcagaaaatgcgctcatcagactgtagataatgactaaaactctgagagaagactttgaaggagtaaccaagcaaagccgtcttgcattaatagatgatggctagccaaaggaagagtcaggagctggatggattggtgggtctggaaaacagttcgctggcagaaatgcaatctcatcagtctccctttgctatgttccttttgatttccacacgtaggtatgtggcccatgctaaatatttaggcaagaaacaagagatggaaatcaaggtcacttgttctgttcaactcccaaagggcaaggaacctttgttgtccctgtagtcattagcagtggagacccacttgtcactgttactacacctatcgtgcaaagatttgctaatctgtagttatcaagtttcaggactcctttgtaaaattcagccagtgttttagaaacatgtactgtccccagacaatgctagccagtggtgtacttatgtagcagtgttacccaagtccacacatcaaagtcacactgctttaataacgtgacatactaggtacatctgcgttatttcgcatctgagaaatgtacacagtcagaggtgaatacactatattccatacagtctgccttgctctctaaaaatatatattctccacatacgtgaacatctttatctctaaactgtcatttgatgaaattttggcaatgtatgtttacctctaaataaagtaattttattgtaaaaaaaaaaaaaaaaaaaaaaaaa

SEQ ID NO: 444 - DNA, 2208 bp, Homo sapiens; identical to SEQ ID NO: 443

SEQ ID NO: 445 - DNA, 2363 bp, Homo sapiens
attccccgcgtctgagtctagctgcaccctgctccttgtctcccatccttgcaaagcttgtctgagtggagccaacacgcccagagggggacaggagagtcaactactaaaccaacaggtttctgcgacctcagcaaatcccagcatgccttcagggacatcccagtgtgaagatggctctgcagggtgcccccaggacttggaggtacagccagaaaaagggcaactggagaagggagcctcaggggacaaggaaagagtctggatctcgcctgataccccaagcagatgtacttggcagctgggcaggcccatggcggattccccacattaccacacagtgccgacaaaatccccgaaaattttgccagatattctgaggaaaattggcaacacccctatggtcagaatcaacaggatctccaagaatgcaggactcaagtgcgagctgttggccaagtgtgagttcttcaacgccggtgggagtgtgaaggaccgcatcagcctccggatgattgaagacgctgagcgagccggaaccttgaagcccggagacacgatcattgagccaacttctggcaacacagggatcgggctggctctggcagctgctgtgaagggctatcgctgcattatcgtgatgcctgagaagatgagtatggagaaggtggatgtgctgcgagctctgggagctgagattgtgaggacgcccaccaacgccagattcgattcccccgagtcccacgtaggagtggcatggcgactgaagaacgaaatccccaattctcacattctggaccagtaccgcaatgccagcaaccccttggcgcactacgatgacaccgcagaggagatcctgcagcagtgcgacgggaaggtggacatgctggtggcttcagcaggcacgggtggcaccatcacgggtatcgcgaggaagctgaaggagaagtgcccaggttgtaaaatcatcggtgtagatcccgaggggtccatcctcgcggagcccgaggagctgaaccagacggagcaaacagcctatgaggtggaagggatcggctacgacttcatccccaccgtcctggacagggcggtggtggataggtggttcaagagcaatgatgacgattccttcgccttcgcccgcatgctcatctcccaggagggactgctgtgcggtgggagttcaggcagcgctatggccgtggctgtgaaggctgcccaggagctaaaggaaggacagcgctgtgtggtcatcctgcccgactctgtgcgcaactacatgtccaagttcttgagtgacaaatggatgctgcagaaaggcttcatgaaggaggagctctccgtgaagagaccctggtggtggcatctgcgtgtccaagagctgagcccatcagcaccgctgaccgtgttgcccactgtcacctgtgagcacaccatcgccatcctccgggagaagggttttgaccaggcacctgtggtcaacgagtctggggccatcctagggatggtgactctcgggaacatgttgtcctccctgcttgctgggaaggtgcggccatcagacgaagtctgcaaagtcctctacaagcagttcaagccgatccacctgaccgacacactgggcatgctctcccacatcctggagatggaccacttcgccctggtggtccatgagcagatccaataccgcaacaatggcgtgtccagcaagcagctgatggtgtttggtgttgttaccgccattgacctgctaaacttcgtggcagcccgtgagcagacccggaaatagagttcagaagtcaggactggcttccatcctccctgctgggacttcttggctttcagagacaccgactggtttccacacccaagtccagcaggtggctgctgaggccagcaccctcccctcctaacgctcagctccctataggaatcctctatgtccgagtagcttacgtgggctttcctctggtgtcccagaaccaaggaatggcagccaggaaagataggcacagactacactcgccacaagactcagggtgcctaggaaagtgtcctctccagagagggctccagcctgagaaagggcaaaccctggactgactgtgctcatcctcagggggcagtgctggccccagcaagggagcatgtgggttttaaatgaaggtgcgttccagtgacctgagacccacagctgtgaagtaaacgtcgtgcctgtacggagtgtcaccacctgggtcatgaccctgcttagcagttcctcctcacatctccctcctttcccgacaagcacctactttctgtctcaactcttcctataaatgaatcacatacctgtggccatgtctacctaatttggaatt

SEQ ID NO: 446 - DNA, 466 bp, Homo sapiens
tcctcctttacagctcgggcaccgtagccatcatgaatgacacggtaaccatccggaccaggaagttcatgacaaaccgtctgcttcagaggaaacagatggtcattgatgtccttcatcctgggaaggccacagtaccaaagacagaaattcgggaaaagctggccaagatgtacaaaaccacaccagatgtcatctttgtatttggattcagaacccactttggtggaggcaagacaactggctttggcatgatctatgattctttagattatgcaaagaagaatgagcctaaacacagacttgcgagacatggcctttatgagaagaaaaagacctcccgcaaacagcgaaaagaacgaaagaacagaatgaagaaggtcagggggactgcaaaggccaatgttggtgctggcaaaaagccaaaggagtagttctacggtgacttgatgttctgctgtgatat

SEQ ID NO: 447 - DNA, 2793 bp, Homo sapiens; identical to SEQ ID NO: 254

SEQ ID NO: 448 - DNA, 2793 bp, Homo sapiens; identical to SEQ ID NO: 254

SEQ ID NO: 449 - DNA, 659 bp, Homo sapiens
ggggatatttgcttctgatactgttgtgttgactcgcaacctcaggaacagacaccatggtgcacctaactgatgctgagaaggctactgttaatggcctgtggggaaaggtgaaccctgttgaaattggcgctgagtcccttgccagtctgctgattgtctacccttggacccagaggtacttttctaaatttggggacctgtcctctgtctctgctatcatgggtaacccccaggtgaaggcccatggcgaaaaggtgataaacgccttcgatgatggcctgaaacacttggacaacctcaagggcacctttgccagcctcagtgaactccactgtgacaagctgcatgtggatcctgagaacttcaggctcctgggcaatatgattgtgattatgatgggccaccacctgggcaaggaattcaccccgagtgcacaggctgccttccagaaggtggtggctggagtggccagtgccctggctcacaagtaccactaaacctcttttcctgctcttgtctttgtgcaatggtcaattgttcccaagagagcttctgtcagttgttgtcaaaatgacaaagacctttgaaaatctgtcctactaattaaaggcatttactttcactacaaaaaaaaaaaaaaaaaaaaaaaaaaaaaa

SEQ ID NO: 450 - DNA, 1662 bp, Homo sapiens
ggccccgctcctcgccctgcctaccgccggcatctaaacacaggtgggagtgggagatcccgacaggtgagccccgcgccccgcagccacaaggatggagttcgtgaagtgtctaggccacccggaggagttctacaacctgctgcgattccgcatgggaggccggcggaatttcatacccaagatggaccggaactcgctcagcaacagcttgaagacttgctataagtatcttgatcagaccagtcgcagcttcgccgcggttatccaggcgctggatggggacatacgtcatgcggtgtgtgtgttttacctgatcctccgagccatggacacagtggaggatgacatggccatcagtgtggagaagaagatcccactgctgcgaaactttcacactttcctctatgagccggagtggcggttcaccgagagcaaggagaagcaccgagtagtgctggaggacttccccacgatctccctggagtttagaaatttggctgagaaatatcaaacagtgatcgctgacatctgtcacaggatgggatgtgggatggcagaatttctaaacaaggatgtaacctccaaacaggactgggacaagtactgtcactatgttgctggactggtgggaatcggcctttctcgcctattctctgcctcagagtttgaagatcccatagttggtgaagacacagagtgtgccaattctatgggtctgtttctgcagaaaacaaatatcattcgtgattatctggaagaccaacaagaaggaagacagttttggcctcaagaggtatggggcaaatatgttaagaagctggaagactttgttaagccagagaacgtagatgtggccgtgaagtgcttgaatgaactcataaccaacgccctacaacacatccctgacgtcatcacctacctgtcaaggctccggaaccaaagtgtgtttaacttctgtgccattccacaggtaatggccattgctacgctggctgcctgttacaataaccatcaggtattcaagggagtagtgaagattcggaaggggcaagcagttaccctcatgatggatgccaccaacatgccagctgtcaaagctatcatataccagtacatagaagagatttatcaccgggtccccaactcagacccgtcagctagcaaggccaagcagctcatctccaacatcaggacgcagagccttcccaattgccagctcatctcccgaagccactactcccccatttacctgtccttcatcatgctcttggctgccctgagctggcagtacttgagcactctgtcccaggtcacagaagactatgtccagagagaacactgactttgtttagctggaagcggaagtccacgtgaagtgggtttttcttcttcccccagctggattttgacttcccttggtttttccttctactctaatctttcggagaactgagtgtgggacctttaggaactctgaagaggaaaggacgccttgccctcagcagcctggtgcttcctggatgtggtccctgcctcttgtagccactggcatcatgttgaccgaagcactggaaaggccacatgtgatcctagtgaacctggctagaatgctgattgaatctatttaatttgaaacagcctttgaatacctatcacagt

SEQ ID NO: 451 - DNA, 1662 bp, Homo sapiens; identical to SEQ ID NO: 450

SEQ ID NO: 452 - DNA, 4595 bp, Homo sapiens
aggaccagatctctggcggggagtagggtgcaaggcagccaggtctccgatcctttccgcagcatggggaagcacaggctccggagcctggccctgctgccactgctgctgcggctgctgctgctgctgctgcccaccgatgcctcagctccacaaaaaccaatctacatggtgatggttccctccctgctccacgcaggaacccccgagaaggcctgcttcctgttcagccatctaaacgagacagtggctgtgagagtgtccttggagtctgtccatgggaaccaaagcctcttcactgaccttgtagttgacaaggacctattccactgtacctccttcaccgtcccacagtcttcatctgatgagctgatgtttttcactgtccaagtaaaaggagcaactcatgagttcaggaggcagagcacggtgctggttaagaagaaagagagcctggtctttgctcagactgacaagcccatctacaaaccaggacagacagtgagatttcgtgttgtctcattggacgaaagtttccatccccttaatgaattgattcctctactgtacattcaggatcccaaaaacaatcgcattgcacaatggcagaatttcaatttagagggtggcctcaaacagctgtccttccccctctcctcagagcccactcagggctcctacaaggtggtgatacgtacagaatcaggcaggaccgtcgagcaccctttctctgtggaggaattcgtgcttcccaagttcgaagtgagagtgacagttccagaaacaatcaccatcctggaggaagagatgaatgtgtccgtgtgtggaatatacacctatgggaagcctgttccaggacgtgtgactgtaaacatttgcagaaagtacagtaatccttctaactgcttcggcgaagagtccgtggctttctgtgagaaactcagccaacagttagacggccgtggctgcttctcacagctagtgaaaaccaagtccttccagctaaagagacaagagtatgagatgcagctcgatgtacatgccaagatccaagaagaaggaacaggtgtggaagaaactggaaaggggctcactaagatcacaagaaccataaccaaactatcatttgtgaacgtggattcacatttcagacaaggaattcctttcgttggacaggtgctcctggtggatgggagaggcacccctattccgtatgaaacgatcttcattggggcggatgaagcaaacctgtacataaatacaaccactgataagcacggcctggcgaggttctccatcaacaccgatgacatcatgggcacgtccctaactgtcagggccaaatacaaggatagcaacgcctgctatggattcagatggttgacagaagagaatgtagaggcttggcacactgcctacgctgttttctcaccaagcagaagcttcctgcacctggaatccctgcctgataaactgcgctgtgaccaaaccctggaggtccaggcacattacattctaaatggcgaggccatgcaggagctgaaggagctcgtcttctactatctgatgatggccaagggaggcatcgtacgggcggggactcacgttctgcccctgaagcagggacaaatgagaggtcacttttccatactcatctcgatggagacagacctggctcccgtggctcgactggtcctctatgccatcctacccaatggagaagtggttggagacactgctaaatatgagattgagaactgcctggctaacaaggtggatttggtcttccgcccgaatagcggtcttccagctacccgtgccctccttagtgtcatggcttctcctcagtccctttgtggcctgcgagctgtggaccaaagcgtgctgctcatgaaacctgagactgagctctccgcatccctgatttatgacctgctaccagtgaaagacctcactggcttccctcagggtgcggatcaacgggaagaagacactaatggctgcgttaagcaaaatgacacttacattaatggaatcctgtactcgccagtgcagaatacaaatgaagaggacatgtacggcttcctaaaggatatgggcttaaaggtatttaccaactcgaacatccgtaaacccaaagtctgcgaacggctcagagacaataaaggaataccagctgcgtaccacctcgtaagccaaagccacatggacgcttttctagagtcttcagagtctcccacagagactaggcgaagctacttccctgagacgtggatctgggacttggtggtggtggactcagcaggagtggctgaagtggaagtgacagtccccgacaccatcactgaatggaaggccggggccttctgcctgtctaatgacactggtctgggcctgtctcctgtggtccaattccaagccttccagcccttcttcgtggagctcacaatgccctactccgtgatccgtggagaagccttcacgctcaaggccactgtgctgaactacctccctacatgcatccgggttgccgtgcagctggaggcctctcccgattttctggctgccccagaggagaaggaacaaaggtctcactgcatctgtatgaaccagcggcacaccgcgtcctgggcagtgatccccaagtcattaggaaatgtgaatttcacagttagtgccgaggcactgaactctaaggagctgtgtgggaatgaggtaccggtggtccctgaacagggcaaaaaagacacgatcatcaagtccctgctggttgaacccgaaggtctagagaacgaagtgacatttaacagtctgctttgtccaatgggtgctgaggtatctgaactgatagccctgaagctgccatcagacgtggtagaggaatctgccagagcctctgtcacagttttgggagatatattgggttctgccatgcagaatacacaggatctcctcaagatgccctatggctgtggagaacagaacatggttctctttgctcctaatatctatgtcctggactatctgaatgaaacacagcagctgacacaggagatcaagaccaaggccattgcctatctcaatacgggctaccaaagacaattaaactacaagcaccgggatggctcctacagcgcctttggggataaacctggcaggaatcatgccaatacctggctcacagcctttgtactgaagagttttgctcaggctcgaaaatatatcttcatcgatgaagtacacatcacccaagccctcttatggctctctcagcagcagaaggacaatggttgtttcaggagctccgggtcactgctcaacaatgccatgaagggaggagtagaagatgaagtcaccttgtctgcctacatcaccatagctctcctggagatgtctcttcctgtcactcatcctgttgtccgcaatgccctcttttgcctggacacagcctggaagtcagcaaggggaggagctggtggcagccatgtctacactaaggcgctgttggcctatgcatttgcccttgctggtaaccaggacacgaagaaggagatcctgaaatcactcgatgaggaggctgtaaaagaagaagattctgtccactggaccagacctcagaaacccagcgtgtcagtgggcctctggtaccaaccccaggctacctcggctgaggtagagatgactgcatatgtgctcctggcttatcttaccactgagccagctccaacccaagaggacctaacggctgccatgctcatcgtgaagtggctcacaaagcagcagaattcccacggtggcttctcttccacccaggacactgtagtggctctccacgctttgtccaaatacgggtccgccactttcacaagagctaagaaagctgcacaggtgaccatccgttcttcgggcacattttctacaaaattccaagtcaacaacaacaaccaattattactccagagagtcacattgccgactgtgcctggggattacaccgtgaaggtgacaggagaaggctgtgtctacctccagacatccttgaaatacagtgttctcccgagagaggaggagttccccttcgctgtggtggtgcagactctgcctgggacatgtgaggatcccaaagctcacaccagcttccagatctcactcaacatcagttacactggaagccgttctgaatccaacatggcaattgctgacgtgaagatggtgtccggcttcatccccttgaaaccaacagtgaaaatgcttgaaagatctgtgcatgtgagccgaacagaagtcagcaataaccatgtcttgatttacctggataaggtgtcaaatcagacggtgaacttgtccttcacggttcagcaagatattccaataagagacctgaagccagccgtagtgaaagtctacgattactatgagaaagatgagtttgcagttgcaaaatacagcgctccctgcagcacagattatggaaatgcctgaggacgcagtgaataagaagtgtttcgccagagccctgacctcaggacttcccaagaaaaacagtgtatttgtatttccagagatttgatcaataaaccatttttttcatatct

SEQ ID NO: 453 - DNA, 4595 bp, Homo sapiens; identical to SEQ ID NO: 452

SEQ ID NO: 454 - DNA, 4595 bp, Homo sapiens; identical to SEQ ID NO: 452

SEQ ID NO: 455 - DNA, 1619 bp, Homo sapiens
actttcaggcctcgtgaggtagagggctggcctgcgcctgcgcctgccatcattttggtttgttaagcaaggcagagcatgagcgagtcggtgggacgcacctccgcgatgcatcggctgcaggtagtgctgggccacctggccggccgacccgagtcgagctccgcgctgcaagccgcgccctgctccgctaccttcccgcaggcttcggcctccgacgtggtggtggtgcacggacggcgcacccccatcggccgcgcgggccgcggcggcttcaaggacaccacccccgacgagcttctgtcggccgtgttgaccgcggttctccaggacgtgaagctaaagcctgagtgtttgggagacatctctgtgggtaacgtacttgagccaggagccggagcagtcatggcgcgcattgcccaatttctgagtggcatcccagagaccgtgcctctgtcagcagtcaacagacagtgttcatcgggactgcaggcagtggccaacattgctggtggcatcagaaatgggtcttacgacattggcatggcctgtggggtggagtccatgtccctgtctaacagagggaaccctgggaatatttcctcccgcctgctggagagtgacaaagccagagactgcctgattcctatggggataacctcggagaatgtggctgagcggtttggcatctcacggcagaagcaagatgccttcgcgctggcctctcagcagaaggcagcaagtgcccagagcaaaggctgcttccgtgctgagatcgtacctgtgacaaccactgtcctcgatgacaagggtgacaggaaaaccatcaccgtgtctcaggatgagggtgtccgccccagcaccaccatggagggcctggccaagctgaagcctgccttcaaggatggaggctctaccacggctggaaactccagtcaggtgagtgatggagcagccgccgtcctgctggcccggaggtccaaggctgaagaactgggcctccccatccttggcgtcctgaggtcctatgcagtggtcggggtccctcctgacatcatgggcatcggacctgcctatgccatccctgcggccttgcagaaagcagggctgactgtgaatgacatagacatctttgagatcaatgaggcctttgcaagtcaggccctctactgtgtggagaagctgggaattcctgcagagaaggtgaaccccctggggggtgcaatagccctgggccaccccctgggctgcaccggagcaaggcaggtggtcacgctgctcaatgagctgaagcgccgaggcacacgggcttatggcgtggtgtccatgtgcattgggactgggatgggagccgctgctgtctttgaataccctgggaactgaggccctgactgcaggcactacccagagagtcctatagtagtgtctggagagggatggtacaggagccatcttcgtgggacactcagcagtggagggatttgtcacagcacttcaattcagaagatgtagtcgatgttggaacaggaggtggaactgccctgtcaagtaccccaagccatgctaaagtgagcatgggacacccaggttgcaaagccatctgtacctctgacggatgc

SEQ ID NO: 456 - DNA, 1619 bp, Homo sapiens; identical to SEQ ID NO: 455

SEQ ID NO: 457 - DNA, 1990 bp, Homo sapiens
tccggcttctaccactgtctgggatgaagcagccagcaaccatgaagtggagcgcatccatttccttccttctcctgctaaattttgctgaacccagagtactgcacacaaatgagtttggaatagaatccacgttagactcttcccaatgcccgacagagaaaaatatgtttaacgtagctaccattgtcgttgcccagtttgttcaggatgccacaaaggccgaagtaaacaaaatgagtagcgatgcgttggctgcaatgaaggaaaacactggcgatgggtgtttagaaaaccagctatctgtgtttctggatgaaatttgccacgagacggaactctctaacaagtatggattctcaggttgctgcaaccaaagcggggtggaaagacaccagtgtctgctggctcgcaagaagaccgctccagactctgtcccacccttccactttccagaaactgccgagagttgcccagcatacgaagaaaacagggcgatgtccataaacacgttcatctacgatgtgtcgaagaggaaccccttcctgtatgctcccaccattctttacttagccgctcagtatgacaaggcagttccagcatgctgcaaagctgacaacatggaggaatgcttccagacaaagagagcatcaatggcaaaggaattaagagaaggaagcatgctcaatgagcatgtgtgtgcagtaataagaaagtttggatcccggaatctccaggctgtactcatcattaaactaagtcaaaagtttcccaaagcaaatattactgagattcggaagctggccctggacgtggcccacatccacgagcagtgctgccacggcaacgcgatggagtgcctacaggatggggaaagcgtcatgacacatatgtgttctcaacaagaaattctgtcgagcaaaacagcagagtgctgcaaactacccaccatcgagctcggctattgcataattcatgccgaaaatggcgacaaaccggaaggtttaactctgaacccaagcgagtttttgggagacagaaattttgcccagttttcttcagaggaaaaactcctgtttatggcaagctttcttcatgaatattcaagaaatcaccccaaccttcctgtctcagtcattctaaaaactgctaagtcataccaggaaattttggagaagtgctcccagtctgaaacgccatcgaaatgccaggacaatatggaagaagaattgcaaaaacacatccaggagagccaggcactggccaaacaaagttgtaatctctaccagaagttaggaccctactacttacaaaatctgttcctcattggctacacgcggaaggctcctcagctgacctcagcagagctgatagacctgacagggaagatggtgagcattgcctcaacgtgctgccagctcagtgaggagaaacggtccgcctgcggtgagggactggccgacatttacattggacacttgtgtttaagacatgaggcaaaccctgtgaactccggtatcaaccactgctgcagttcctcgtattccaacaggaggctctgcatcaccagctttctgagggacgaaacctacgtccctccaccattctctgaagacaaattcatcttccacaaggatctgtgccaagctcagggccgagccctacagaccatgaaacaagagcttctcattaacctggtgaaacaaaagcctgaaatgacagaggagcagcacgcggctgtcactgctgatttctctggcctcttggagaagtgctgcaaagaccaggatcaggaagcctgtttcgcaaaagagggtccaaagttgatttccaaaactcgtgaggctttgggggtttaaacatctccaggaggaagaaaggacaaaaaaatgtgtcgacgctttggtgtgagcttttcggtttgatggtaactggtggagacttccatgtgggatttctatgccttaggaataaagacttttcaactgtt

SEQ ID NO: 458 - DNA, 1990 bp, Homo sapiens; identical to SEQ ID NO: 457

SEQ ID NO: 459 - DNA, 3636 bp, Homo sapiens
ggagcctcggcgggaggaggcggacacgtggcagcggcggcggcagcggcagcagcagcggcggcagcagcggcggcctcggtccggggcgccggccgtcctccctctttcctccggcggcagccctagttcccgcctctcggctcccccggctccactctcccagccgggagctgctctctcctctttctagtctccagccacaggacccggcgcggggcccgcagcgccgccaccatggggaagggggttggacgagacaagtatgagcccgcagctgtatcagaacatggggacaagaagagcaagaaggcgaagaaggaaagggacatggacgaactcaagaaggaagtgtctatggacgaccataaactcagcctggatgaactccatcgtaaatacggaacagatttgagccgaggcctaacacccgcaagggccgctgagatcctggctcgggatggccccaacgccctcacgccccctcccactactcccgagtgggtcaaattctgtcggcagctgttcggtggcttctccatgttactgtggattggagccattctttgtttcttggcttatggcatccgaagtgctacagaagaggaaccaccaaatgatgatctgtacctcggggtcgtgctgtctgctgtcgtcatcataactggctgtttctcctattatcaagaagcaaaaagctccaagatcatggaatccttcaagaacatggtccctcagcaagccctcgtgattcgaaatggagagaagatgagcatcaacgcagaggatgtcgtcgttggtgatctggtggaggtgaagggcggagaccgaatccctgctgatctcagaatcatatctgcaaatggctgcaaggtggataactcctcactcactggtgaatcagaaccccagactcggtccccggatttcacaaacgagaaccccttggagacaaggaacattgccttcttctcaaccaactgtgttgaaggaactgcacgtggcatcgttgtgtacactggggatcgcaccgtgatgggcaggatcgccacccttgcttctgggctggaaggcggccagacccccattgctgaagaaatcgagcacttcatccacctcatcacgggtgtggccgtgttcctgggggtgtctttcttcattctctctctgatccttgagtacacctggctcgaggctgtcatcttcctcattggtatcatcgtagccaacgtgccggaaggtttgctggccaccgtcacggtatgtctgacgctcactgccaagcgcatggcgaggaagaactgcctggtgaagaacctggaagctgtggagaccttggggtccacatccaccatctgctccgacaagactggaactctgactcagaaccggatgacagtggctcacatgtggtttgacaatcaaatccatgaagctgacaccacagagaatcagagtggggtctcctttgacaagacgtcagccacctggttcgctctgtccagaattgctggtctctgtaacagggcagtgtttcaggctaaccaagaaaacctgcctatccttaagcgtgcagtagcgggagatgcttccgagtcggcgctcttaaagtgcatcgaggtctgctgtggctccgtgatggagatgagggagaagtacaccaagatagtggagattcctttcaactccaccaacaagtaccagctctccattcacaagaacccaaacgcatcggagcctaagcacctgctagtgatgaagggcgccccagaaaggatcctggaccgatgcagttctatcctcctccacggcaaggagcagcccctggacgaagagctgaaggacgcctttcagaatgcctacctagagctggggggccttggagagcgtgtgctaggtttctgccacctccttctgcctgacgaacagtttcccgaaggcttccagtttgacactgatgaagtcaatttccccgtggataacctctgcttcgtgggtcttatctccatgattgaccctcctcgagctgctgtccccgatgctgtgggcaaatgccgcagcgctgggattaaggtcatcatggtcacaggagaccatccaatcacagccaaagccattgctaagggggtgggcattatctcagaaggtaacgagaccgtggaagacattgctgcccgcctcaacattccagtgaaccaggtgaaccccagagatgccaaggcctgtgtagtacatggcagtgacttgaaggacatgacctctgaggagctggatgacattttgcggtaccacacggagattgtctttgctaggacctctcctcaacagaagctcatcattgtggagggctgccagcggcagggtgccatcgtggctgtcacaggggatggtgtcaatgactctccagctttgaaaaaggcagatattggggttgccatggggattgttggctcggatgtgtccaagcaagctgctgacatgattcttctggatgacaactttgcctccatcgtgactggagtagaagaaggtcgtctgatatttgataacttgaagaaatccattgcttacaccctaacaagtaacattccggaaatcacccccttcttgatatttattattgcaaacattccactgcccctgggcaccgtgaccatcctctgcattgacttgggcactgacatggttcccgccatctctctggcctatgaacaggctgaaagtgacatcatgaagaggcagcccagaaatcccaaaacggacaaacttgtgaacgagcgtctgatcagcatggcctatggacagatcggtatgatccaggccctgggaggcttcttcacttattttgtgattctggctgagaacggtttcctgccctttcacctgttgggcatccgagagacctgggatgaccgctggatcaatgatgtggaggacagctacgggcagcagtggacctacgagcagaggaagattgtggagttcacctgccacacggccttctttgtcagtatcgtggtagtgcagtgggctgacttggtcatctgcaagaccagaaggaattctgtcttccagcagggaatgaagaacaagatcttaatatttggcctctttgaagagacagctcttgctgctttcctgtcctactgccctgggatgggtgcagcccttaggatgtatcccctcaaacctacttggtggttctgtgccttcccctactcccttctcatcttcgtgtatgacgaggtgcggaagctcatcatcaggcgacgccctggcggctgggtggagaaggaaacctactactagcccactgccctgcacgccgtggaacattgtgccacacactgcacctacccctaccccccctttgtgtacttcaagtcttggagctcggaactctaccctggtaggaaagcaccaaagcatgtggggatccagacgtcctggaatgaagcatgtagctgtaatggggggcggggggagggctgcccgaaaaacaccgtggacggggacgacagcggggaaggtttatatgtgcctttttgtttttgtaaaaaaggaaaacctggaaagactgaaagattacgttttatatctggatttttacaaataaagatggctattataacggaa

SEQ ID NO: 460 - DNA, 4228 bp, Homo sapiens
cgcagggccgggccgggccgggcgcgcagcaggggcggcggcagcggcagcggcagcggcggcggcggcatcatcgccccggagcgggcgcagggtttgccaccctcggagtgtggactaacagcagccgaggagacagagctgaacttggtcacgcagtccctagagtcagcaagacatgggttccattgtgcagctcctgacacctctgatgtaaccagatgacgtggaggggagctgtcccgaccatgtagatgccagccccagggatgatcagcatgggccccactgaatggagactcctgggtcagcattcctgagcctcttcggcccctggacctcaccccactcctggggacactcctcagagctctccagtgctgtcgccagcccacctcagccatcgcctcctcctgggactggaagttggcctcctggagctaataccctctggtgagggtgtactgaggacagccacacacagccatcacccacaggccccttttccagtgctgaccctcaggcccagcctgagcagaaacttcagcaaacatgggtgatatgaccaacagcgacttttactccaaaaaccaaagaaatgagtcgagccatgggggcgagttcgggtgcagcatggaggagctgcgctccctcatggagctgcggggcactgaggctgtggtcaagatcaaggagacatatggggacactgaatccatctgccggcgcctcaaaacctctcctgttgaaggtttgccaggcaccgctccagacctggaaaagaggaaacagattttcgggcaaaacttcatacctccaaagaaaccaaaaaccttcctgcagctggtgtgggaagcactacaggacgtgacgctcatcatcctggagatcgcggccatcatctccctgggactgtccttctaccacccacccggagagagcaatgaaggatgtgccacggcccaaggtggggcagaagatgaaggtgaagcagaagcaggctggatcgagggggctgccatcctgctgtcagtcatctgtgtggtcctcgtcacagccttcaatgattggagtaaagagaaacagttccggggcctgcagagccgaattgagcaggaacagaagttcaccgtagtccgggctggccaggtggtccagatccctgtggccgagattgtggttggggacattgcccagatcaaatacggtgacctccttcctgctgatggcctcttcatccagggcaatgacctcaagatcgatgaaagctcgctcacaggggagtctgaccaggtgcgcaagtctgtggataaggaccctatgttgctgtcaggaactcatgtgatggaaggctcaggacggatggtggtgactgctgtgggtgtcaactctcaaactggcatcatatttaccctgcttggggctggtggtgaagaggaagagaagaaagacaaaaaagccaagcagcaggatggggcagctgctatggaaatgcagcctctgaagagtgcggagggcggtgatgcagatgacaagaagaaagccaacatgcacaagaaagagaagtcggtgcttcagggcaagctcaccaagctggctgtgcagataggcaaggcgggcctggtgatgtcggccatcacggtgatcatcctggtgctctacttcaccgtggacaccttcgtggtcaacaagaagccgtggctgacggagtgcacaccggtctacgtgcagtacttcgtcaagttcttcatcattggtgtgacggtgctggtggtcgctgtgcccgagggcctccctctggctgtcaccatctcactggcctattccgtgaagaaaatgatgaaggacaacaacctggtccgtcacctggacgcctgtgagaccatgggtaacgccacagccatctgctcagacaagacaggcacgctgaccaccaaccgcatgaccgtggtgcaggcctatgtcggtgatgtccactacaaggagatccctgatcccagctccatcaatgccaagacattggagctgctggtcaacgccattgccatcaacagcgcctacaccaccaagatcctccccccagaaaaagagggcgccctgccccggcaggtgggcaacaagacagagtgtggcctgctgggcttcgtgctggacctgaggcaggattacgagccggtacgcagccagatgccagaggaaaagctgtataaggtgtacaccttcaactctgtgcgcaagtccatgagcaccgtcatcaagatgcctgacgagagcttccgcatgtacagcaaaggtgcttcggagattgtgctcaaaaagtgctgcaagattctcagtggggcaggggagccccgtgtcttccggccccgtgacagggatgagatggttaagaaggtgatcgagcccatggcctgtgacgggctccgtaccatctgtgtggcctatcgtgacttccccagcagccctgagcctgactgggacaatgagaatgacattctcaatgaactcacctgcatctgcgtggtgggcatcgaagacccagtgcgacctgaggtcccagaagccatccgcaagtgccagcgggccggtatcacagtccgcatggtcaccggtgacaacatcaacacagcccgggccatcgccatcaagtgtggcattatccaccctggagaggacttcctgtgcctggaaggcaaagaattcaatcggaggatccgcaacgagaagggggagattgagcaggagcggattgacaagatctggccaaagctgagggtgctggctcgatcctcgcccacggataagcacaccctggtcaaaggcatcatcgacagcacacacactgagcagcggcaggtggtggctgtgacaggggatgggaccaacgatgggcctgctctcaagaaggcagatgtgggcttcgcgatgggcatcgcaggcacggatgtggccaaggaggcctcagacatcatcctgacagacgacaacttcagcagcatcgttaaggcagtgatgtggggccgtaatgtctatgacagcatatccaaattcctgcagtttcagctgactgtcaatgtggtggctgtgatcgtggccttcacgggtgcctgcattacacaggactcccctctcaaggcggtgcagatgctctgggtgaacctcatcatggacacatttgcttccctggccctggcaacagagccacccaccgagactctgctcctgaggaaaccttacggccgcaacaagccgctcatctcgagaaccatgatgaagaacatcctgggccacgccgtctaccagctaaccctcatcttcaccctgctcttcgtgggtgagaagatgttccagattgacagcggaaggaacgccccgctgcactcgccaccctcggagcactacaccatcatcttcaacaccttcgtcatgatgcagcttttcaacgagatcaacgcccgtaagatccacggcgagcgtaacgtcttcgacggaatcttccggaaccccatcttctgcaccatcgttctcggcacttttgccatccagatagtgattgtgcagttcggcggcaaacccttcagctgctccccactccagctggaccagtggatgtggtgcatcttcataggcctgggagagctcgtctggggccaggtcattgccaccatccctaccagcaggctcaagtttctgaaagaggcagggcggctaacacagaaggaggagatccccgaggaagagttaaatgaggatgtggaagagatagaccacgcagagcgggagcttcgccgaggccagatcctatggttccggggcctgaatcggatccagacacagatccgcgtcgtgaaggcgttccgtagctctctctatgaagggttagaaaaacccgagtctcgaacctccatccataacttcatggctcatcctgaattccggatcgaagattcccagccccacatccccctcatcgatgacaccgacctggaagaagatgccgcgctcaagcagaactcgagcccgccgtcctcgctcaacaagaacaatagcgccatcgacagcgggatcaacctgacgaccgacacgagcaaatcagctacctcttcaagtccagggagccccatccacagcctggagacgtcgctttagctgaggcccctgtcgcctggccatgctcatggacccaccgccacccgcctccaggcgcacacccttccaggcaccaact

SEQ ID NO: 461 - DNA, 1882 bp, Homo sapiens
gggcccttgtctacgttctgcagagcctccggtccaactttgttccaaatgagcctcactgctgctctttgggttgctgtattcggaaaatgtggcccaccacctgatttaccctacgccctgccagcaagtgagatgaaccagacagactttgaaagtcacactaccctgagatacaattgtcgccctggctatagtagagcgagctcaagccagagtctctactgtaaacctctggggaaatggcagattaatatcgcctgcgtcaaaaagtcatgcaggaatccaggagacttacaaaatggaaaggtggaagttaagacagatttcttgtttggatcacagatagaattcagctgctcagagggatatatcttaattggctcatccactagttattgtgagatccaaggcaaaggagtttcctggagtgatcctctcccagaatgtgtaattgccaagtgtgggatgcctccagacatcagcaatgggaagcacaatggtagagaggaagaattcttcacatatcgttcctcagtcacctataagtgtgatcctgacttcacactccttggcaatgcctccattacctgcactgtggtgaacaaaacagtaggtgtttggagcccaagccctcctacctgtgaaagaatcatctgtccttggccaaaagttttgcatggaacaattaattctggattcaagcatacctataaatacaaagactctgtgagatttgtctgccagaaagggtttgtcctcagaggcagcggtgtaatccattgtgaggctgatggcagctggagtcccgtaccagtgtgtgagctcaatagttgcactgatattccagacattcctaatgctgccctgataaccagtcccaggccaagaaaggaagatgtatatccagtgggtactgtgctccgttacatctgtcgtcctggctatgaacctgctacgagacagcccatgactgtgatttgtcagaaagatctcagctggagcatgcttagggggtgtaaggagatatgctgtccagtaccagacccaaagagtgttagagtcattcaacatgaaaaggcacatcctgacaacgactgtacttacttctttggtgacgaagtgtcatacacatgtcaaaatgatataatgcttacagctacttgcaagtcagatggcacctggcatccccggacaccatcatgtcatcagagttgtgattttccgcctgccattgctcacggacgttatacaaaatcttcttcatactacgtcagaactcaggttacatatgaatgtgaagaaggatacagactggttggagaggcaaccatctcctgctggtattcacaatggacaccagcagctccacagtgtaaagctctatgtcggaaaccagagataggaaatggagtactgtctactaataaagatcaatatgtcgaaactgaaaatgtcaccatccaatgtgactcgggctttgtcatgctaggttcccaaagcatcacttgttcggagaatggaacctggtacccaaaggtgtccagatgtgagcaggaggtccctaaagactgtgagcacgtgtttgcaggcaagaagctcatgcaatgtctgccaaattcaaatgacgtgaaaatggccctggaggtctacaagctgactctggagattaaacaattacagctccagatagacaaggcaaagcacgttgaccgggagttatgagcgggtgttctctcaaggaggaagaagtacctcatgggctttctgacttcagtgccaagcagaacgtctgcatttttagcaacctttgtaactttggcaccaatgttcatggtaataaatatctgcttagaataattcattaaagcataatgtaagc

SEQ ID NO: 462 - DNA, 2615 bp, Homo sapiens; identical to SEQ ID NO: 319

SEQ ID NO: 463 - DNA, 1799 bp, Homo sapiens
acccttcagtcgtacagatggcgttctcccagtatatctccttagccccagagctgctactggccactgccatcttctgtttagtgttctgggtgttgagaggcacaaggacccaggttcccaaaggtctgaagagtcctcccggaccctggggcttgcccttcattgggcacatgctgaccctggggaagaacccacacctatctctgacaaagctgagtcagcagtatggggacgtgctgcagatccgcattggctccacacccgtggtggtgctgagcggcctgaacaccatcaagcaggccctagtgaagcagggggatgacttcaaaggccggccagacctctacagcttcacacttatcactaatggcaagagcatgactttcaacccagactctggaccggtctgggctgcccgccggcgcctggcccaggatgccctgaagagtttctccatagcctcagaccccacatcagtatcctcttgctacttggaggagcacgtgagcaaagaggctaaccatctaatcagcaagttccagaagctgatggcagaggttggccacttcgaaccagtcaaccaggtggtggaatcggtggctaatgtcatcggagccatgtgttttgggaagaacttccccaggaagagcgaggagatgctcaacctcgtgaagagcagcaaggactttgtggagaatgtcacctcagggaatgctgtggacttctttccggtcctgcgctacctgcccaacccagccctcaagaggtttaagaacttcaatgataactttgtgctgtctctgcagaaaacagtccaggaacactatcaagacttcaacaagaacagtatccaggacatcacaggcgccctgttcaagcacagtgagaactacaaagacaacggtggtctcatccctcaggagaagattgtcaacattgtcaatgacatctttggagctggatttgaaacagtcacaacagccatcttctggagcattttgctacttgtgacagagcccaaggtgcagaggaagattcatgaggagctggacacggtgattggcagagatcggcagccacggctttctgacagaccccagctgccatatctggaggccttcatcctggagatctaccgatacacatcctttgtccccttcaccatcccccacagcacaacgagggacacctcactgaatggcttccacattcccaaggagtgctgcatcttcataaaccagtggcaggtcaaccatgatgagaagcagtggaaagacccctttgtgttccgcccagagcggtttcttaccaatgacaacacggccatcgacaagaccctgagtgagaaggtgatgctcttcggcttgggaaagcgccggtgcattggggagatcccggccaagtgggaagtcttcctcttcttagccatcctcctgcatcagctggagttcactgtgccaccgggcgtgaaggtggacctgacacccagctatgggctgaccatgaagcccagaacctgtgaacacgtccaggcctggccacgcttctccaagtgaagatggccgagacatcggccgccacccttgttccttttcctttctttttaaataacagctttttcaagatacaattcctccaccatttaattcagctccaatcaattttcaatattgtctacactgttccctgcaaacccatacccattaagatttatgactattcctcctaccctgtttcgcttgctgtgccacgtgctaatctagtttttgactcaatagatttgccaactctggctg

SEQ ID NO: 464 - DNA, 1799 bp, Homo sapiens; identical to SEQ ID NO: 463

SEQ ID NO: 465 - DNA, 1799 bp, Homo sapiens; identical to SEQ ID NO: 463

SEQ ID NO: 466 - DNA, 3112 bp, Homo sapiens
cgcagaacttggggagccgccgccgcgattcgccgccgccgccagcttccgccgccgcaagatcggcccctgccccagcctccgcggcagccctgcgtccaccacgggccgcggccaccgccagcctgggggcccacctacactccccgcagtgtgcccctgcaccccgcatgtaacccggccaacatccggcgagtgtgccctcagtagcttcggccccgggctgcgcccaccacccaacatcagctctccagctcgcacgtccgggatggcagcggccaaggccgagatgcaattgatgtctccgctgcagatctctgacccgttcggctcctttcctcactcacccaccatggacaactaccccaaactggaggagatgatgctgctgagcaacggggctccccagttcctcggtgctgccggaaccccagagggcagcggcggcaataacagcagcagcagcagcagcagcagcagcgggggcggtggtgggggcggcagcaacagcggcagcagcgctttcaatcctcaaggggagccgagcgaacaaccctacgagcacctgaccacagagtccttttctgacatcgctctgaataacgagaaggcgctggtggagacaagttatcccagccaaactacccggttgcctcccatcacctatactggccgcttctccctggagcctgcacccaacagtggcaacactttgtggcctgaaccccttttcagcctagtcagtggccttgtgagcatgaccaaccctccaacctcttcatcctcagcgccttctccagctgcttcatcgtcttcctctgcctcccagagcccacccctgagctgtgccgtgccgtccaacgacagcagtcccatttactcagctgcacccacctttcctactcccaacactgacatttttcctgagccccaaagccaggcctttcctggctctgcaggcacagccttgcagtacccgcctcctgcctaccctgccaccaagggtggtttccaggttcccatgatccctgactatctgtttccacaacaacagggagacctgagcctgggcaccccagaccagaagcccttccagggtctggagaaccgtacccagcagccttcgctcactccactatccactatcaaagccttcgccactcagtcgggctcccaggacttaaaggctcttaataacacctaccagtcccaactcatcaaacccagccgcatgcgcaagtaccccaaccggcccagcaagacacccccccatgaacgcccgtatgcttgccctgttgagtcctgcgatcgccgcttttctcgctcggatgagcttacacgccacatccgcatccatacaggccagaagcccttccagtgtcgaatctgcatgcgtaatttcagtcgtagtgaccaccttaccacccacatccgcacccacacaggcgagaagccttttgcctgtgacatttgtgggagaaagtttgccaggagtgatgaacgcaagaggcataccaaaatccacttaagacagaaggacaagaaagcagacaaaagtgtcgtggcctcctcagctgcctcttccctctcttcctacccatccccagtggctacctcctacccatcccccgccaccacctcatttccatccccagtgcccacctcttactcctctccgggctcctctacctacccgtctcctgcacacagtggcttcccatcgccctcggtggccaccacctatgcctccgtcccacctgctttccctgcccaggtcagcaccttccagtctgcaggggtcagcaactccttcagcacctcaacgggtctttcagacatgacagcaaccttttctcctaggacaattgaaatttgctaaagggaatgaaagagagcaaagggaggggagcgcgagagacaataaaggacaggagggaagaaatggcccgcaagaggggctgcctcttaggtcagatggaagatctcagagccaagtccttctagtcagtagaaggcccgttggccaccagccctttcacttagcgtccctgccctccccagtcccggtccttttgacttcagctgcctgaaacagccacgtccaagttcttcacctctatccaaaggacttgatttgcatggtattggataaaccatttcagcatcatctccaccacatgcctggcccttgctcccttcagcactagaacatcaagttggctgaaaaaaaaaatgggtctgggccctcagaaccctgccctgtatctttgtacagcatctgtgccatggattttgttttccttggggtattcttgatgtgaagataatttgcatactctattgtactatttggagttaaattctcactttgggggagggggagcaaagccaagcaaaccaatggtgatcctctattttgtgatgatcctgctgtgacattaggtttgaaacttttttttttttttgaagcagcagtcctaggtattaactggagcatgtgtcagagtgttgttccgttaattttgtaaatactgctcgactgtaactctcacatgtgacaaaatacggtttgtttggttgggttttttgttgtttttgaaaaaaaaattttttttttgcccgtccctttggtttcaaaagtttcacgtcttggtgcctttgtgtgacacaccttgccgatggctggacatgtgcaatcgtgaggggacacgctcacctctagccttaagggggtaggagtgatgtttcaggggaggctttagagcacgatgaggaagagggctgagctgagctttggttctccagaatgtaagaagaaaaatttaaaacaaaaatctgaactctcaaaagtctatttttttaactgaaaatgtagatttatccatgttcgggagttggaatgctgcggttacctactgagtaggcggtgacttttgtatgctatgaacatgaagttcattattttgtggttttattttacttcgtacttgtgtttgcttaaacaaagtgacttgtttggcttataaacacattgaatgcgctttactgcccatgggatatgtggtgtgtatccttcagaaaaattaaaaggaaaataaagaaactaactggt

SEQ ID NO: 467 - DNA, 3112 bp, Homo sapiens; identical to SEQ ID NO: 466

SEQ ID NO: 468 - DNA, 1105 bp, Homo sapiens
agtggtctactctctccacaacatgctgcgcttcctggtgttcgcttccctggtcctgtatggacacagtacccaggactttccggaaactaatgcccgcgtggttggaggggctgaagcccggaggaactcctggccatctcagatttccctccagtacctgtccggaggatcatggtaccacacctgtggagggaccctcatccgacgcaactgggtgatgaccgctgcccactgtgtgagcagccagatgactttccgagtggtcgtcggagaccacaacctgagtcagaatgacggcacggagcagtacgtgagcgtgcagaagatcgtggtgcaccccaactggaacagcaacaatgtggctgcaggctatgacatcgccctattgcgcttggcccagagtgtcacactcaataactacgtccagctggctgttttgccccaggagggaaccatcctggctaacaacaatccctgctatatcacaggctgggggagaaccagaaccaatgggcagctgtctcagaccctgcagcaggcgtacctgcccagcgtggactacagcatctgctccagctcctcttactggggctccacggtgaagacgaccatggtgtgtgctggtggagacggagtccgctctgggtgccagggtgattctgggggacccctccattgcttggtgaacggccagtattctgtccacggagtgaccagctttgtgtccagtatgggctgtaatgtctccaggaagcccacagtcttcacccgagtctctgcttacatttcctggatgaacaatgtcattgcctacaactgaacgtcttcctgagtccagtggcctccccaagatggtgcttagctctgcaataagatctgaagtaagcgagaaggagttagggctggggttatcgctcagcggcagaacactttctaatatgtgcgaagcctgggttccatccctaatactgcagcgggggcaggggagtgctgctggtgtctctctgctctttctccagtatctggggcaaaggtggttaatgaaaaacagctctgagactgagccagatacagaaaggcaaataaaactcaatgtgttatc

SEQ ID NO: 469 - DNA, 493 bp, Homo sapiens
ctgttggtggcagctgggaaaggaaacctcattgccaccatgaacttctccggcaagtaccaagtgcagagccaagagaactttgagcccttcatgaaggcgatgggtctgcctgaggacctcatccagaaagggaaggacatcaagggggtgtcagaaatcgtgcatgaagggaagaaagtcaaactcaccatcacctatgggtccaaggtgatccacaatgagttcaccttgggggaggagtgcgaactggagaccatgactggggaaaaggtcaaggcagtggttaagatggagggtgacaataaaatggtgacaactttcaaaggcataaagtccgtgactgaattcaatggagacacaatcaccaataccatgacactgggtgacatcgtctacaagagagtcagcaagagaatttagacaaggctgtatttcatattcttttacagtataaaattaatacaataaagttacctctgttttgaaataa

SEQ ID NO: 470 - DNA, 1358 bp, Homo sapiens
agtgctggctgtaaggggctgggagcaccggtcacccagacactatgaattggtccttgcaactccggagtttcattctatgctgggcgcttttactactttctccaacgggcctggcacagtacactgctactagagataactgttgcatcctagatgagagattcggtagttactgcccaaccacttgtggcatctcagacttcctgaattcttaccaaaccgacgtggacactgacctccagactctggaaaacatcttacaacgagctgaaaacagaaccacagaagccaaggaactgattaaagccatccaggtttactacaacccggaccaacccccaaagccgggtatgatagagggtgccactcagaagtctaagaagatggtagaagaaatcttgaagtacgaagcactgttactaacccatgagtcgagtatccggtatttacaggacatctatacttcaaataagcagaagatcacgaacctgaaacagaaggtggcccagcttgaagctctgtgccaggagccttgcaaggactctgtgcgaatctatgacataaccggaaaagattgtcaggataccgccaacaagggtgccaaagaaagtggactttactccattcggcctttgaaagccacggagcagttcttagtgtactgtgaaaccgacggacctggaaatggctggaccgaattcaagaagaggcttgatggcagtgtggatttcttgaagaactggattcagtataaagaaggatttggacacctgtcacctactggcaccacagagttttggctgggcaatgagaagaatcatctgataagcatgcagtccaccatcccatacgcactgagaatacagctcaaagactggagtggcaggaccagcaccgcggactatgccatgttcagggtgggtcctgaatccgacaaataccgcctgacctatgcctacttcattggtggagatgccggggatgccttcgacggctacgattttggtgatgatcccagtgacaagtttttcacatcccacaacggcatgcacttcagtacctgggacaatgacaacgacaagttcgaaggcaactgtgctgagcaggatggatctggctggtggatgaacaagtgtcacgctggccacctcaatggagtttattaccaaggtggcacttactccaagtcatctactcctaacggttatgacaatggcattatttgggccacgtggaaaacccgctggtattccatgaaggaaaccaccatgaagataattcccttcaacagactctccattggagatgggcagcaacatcacatgggaggatccaaacaggttggagacatgtaa

SEQ ID NO: 471 - DNA, 1358 bp, Homo sapiens; identical to SEQ ID NO: 470

SEQ ID NO: 472 - DNA, 1358 bp, Homo sapiens; identical to SEQ ID NO: 470

SEQ ID NO: 473 - DNA, 1478 bp, Homo sapiens
cggaagcagggatgtgggacctgaaaagtgagtggtgggcggtgggcttcgggcttctgctgctactggcagcttcggcccaggcagggggcttggctccgcaccactacactccggactggccgagcttggactcgcgaccactgccgagatggttcgacgaggccaagttcgggttgttcgtgcattggggggtgtactcggtgcccgcctggggcagcgagtggttctggtggcactggcagggcgagcagtcgtcggcgtacgtgcgcttcatgaaagaaaactacccgcccggcttcagctacgccgactttgcaccgcagtttacagcgcgcttcttccatccggaggagtgggcagacctcttccaggctgccggggccaagtatgtcgtcctgaccgcaaagcatcacgaaggcttcacaaactggccaagcgccgtgtcttggaactggaactcgaaggacgtggggccccaccgtgatttggtcggtgagttgggagcagctgtgcggaagaggaacatacgatacggcctctaccactcgctctttgagtggttccatccactctacctactagataagaaaaatggcctcaagactcagcatttcgtcagtacaaaaacaatgccagagctgtacgacctcgtgaataggtacaagcctgacctaatctggtctgatggggagtgggagtgtcccgattcgtactggaactccacggagttccttgcttggctctacaatgaaagcccggtcaaggatcaggtggtagtgaatgaccggtggggtcagaactgctcctgtcgtcacggagggtactacaactgtgaagacaaatacagaccacacagcctgccagaccacaagtgggagatgtgcaccagcgttgacaaggcgtcctggggctatcggagagacatgagcatgtctaccatcgtcgacgaaaatgaaatcattgaggaattggttcagacaataagtctgggaggcaactatcttctcaacatcggaccgaataaagacggcgtgatcgtccccatcttccaggaaaggctccttgctgttggcaagtggctgcagatcaacggggaggccatctatgcctccaaaccatggagggtgcagtctgaaaggaacaagacagttgtgtggtacaccactaaagactcggctgtttatgccacttttctgcactggccagaagatggagtggtaaacctccaatctcccaaaatgacatcggccacaaagataacgatgctaggaatggaaggagaactgcactggacccaggacccactggaaggcgtcctcatcactctgccccagttgccaccaggcactttcccagtggagtctgcctggactctaaagctgacaaaagtgaactgatcgcaggagctcaaggatagagggcccagtgtgctgctgtctcttaaggattatcgtgaataaagtagcttcctttcc

SEQ ID NO: 474 - DNA, 1887 bp, Homo sapiens
cttccgtgtccccggcagccacactttagtctggcctgctagtggagcggaagaacagatcgcgagtcaggttctgcacagcctccggcgaaggctggccctttggaaggctccttgaacagccggagcaggccggccaccatgaccgagaactccacctccaccccggcggcgaagcccaagcgggccaaggccgccaagaagtccacggaccaccccaagtattcagacatgatcgtggctgccatccaggcagagaagaaccgcgccggctcctcgcgccagtccatccaaaagtatatcaagagccactacaaggtgggtgagaacgccgactcccagatcaagttgtccatcaagcgcctagtgaccaccggtgttctcaagcaaaccaaaggggtgggcgcctcggggtccttcaggctggccaagggcgatgagcccaagaggtcggtggctttcaagaagaccaagaaggaagtcaagaaagtggccactccaaagaaggcagccaagcccaagaaggctgcttccaaagccccaagcaagaaacccaaagccaccccggtcaagaaggccaagaagaagccggctgccacgcccaagaaagccaaaaagcccaagattgtcaaagtcaagccagtcaaggcatccaaacccaagaaggccaaacccgtgaagcccaaagccaagtcgagtgccaagagagccagcaagaagaaatgacaatgaaggctttgcttggggacactccttcctccctcctgttttctgtaaatacatttctctcttgatcccatctgcaaccctttgcccattctatttggactctatatagaggacagagtttggcttcctcagacagactttgtggaatattttccttaacccattgttcaaggacagcaaacagacctcatctttataatgatggagatgtacttttttcttgatttgatattaaccttacggggttgtgggggggggcgttgtgtgtttccttcggtggtttgtttactatgaaggtaaatggaactggcaaagttctgggtaggtgaggacccaggaactaggttgcttgtccctagtgagcgtttcagaacctttgatgagcaggtgataccccatctacctggccaaggggggttgtgggggagaagaggataaactccctgggctgccctaccaatggtggtaagttgggggacctgatttctttttctcttctgccctagtgcctctccaagtgacagctggttagagaagccatagcttctcacaaccgggatttagccattgggaaggaagggtcttctcagcagtctctggttaaatgggagtggacttagggggaggggtgcagagtcagccaagtgcctcagtgtgcctatggaaacttgggtctttccacacggttgatggattgtgtcctaggaggacgttgttcgtttcctttcccctcttcctgtgtaagatgtggcattgcttggtgccacttcagttctaccagctgccacttaaaacccctccaagcttttgagtcttttctaagtagccgaggagggggagaggcagggagtggactgtgggatatactcccgtggattcgaatttgctaggtagctttagagaagcgggattgtgtgcatgtgtgtatatgtatatatccatatctaagactagtacttagtctcacctcgggagctgggagaaaaactctgtacagttgtcctcttattttaataaagtaggaaactcgggtaccctaccccactttttaaacaagtgtaactagtgccgggaaaaaattactgtggttgtaattttaaaactttaaaataaaactggaaaggaaaaaaaaaaaaaaaaaaaaaaaaaaaaaaaaaa

SEQ ID NO: 475 - DNA, 1887 bp, Homo sapiens; identical to SEQ ID NO: 474

SEQ ID NO: 476 - DNA, 870 bp, Homo sapiens
atggagcgcccacagctcgacagcatgtcccaggatttgtccgaggccttgaaggaggccaccaaggaggtgcacatccgtgcagagaattctgagttcatgaggaactttcagaagggtcaggtgtccagggaaggctttaagctggtgatggcctccttgtaccatatctatacggccctggaagaggagatagagcgaaacaagcagaacccagtctatgccccgctctacttccctgaggagctgcaccgaagggctgccctagagcaggacatggccttctggtatgggccccactggcaggaggccatcccttacacaccagccacacagcactacgtaaagcgtctccacgaggtgggaggtactcatcctgagctgctggtggcccacgcatatacccgctacctgggtgacctctcagggggtcaggtcctgaagaagattgcgcagaaggccatggccttgccaagctctggggaaggcctggcttttttcaccttcccgagcatcgacaaccccaccaagttcaaacagctctatcgtgctcgcatgaacactctggagatgacccccgaggtcaagcacagggtgacagaagaggctaagaccgccttcctgctcaacattgagctgtttgaggagctgcaggcactgctgacagaggaacacaaagaccagagtccctcacagacagagtttcttcgccagaggcctgctagcctggttcaagatactacctctgcagagacgccccgaggaaaatcccagatcagcactagttcatcccagacaccgctcctgcgatgggtcctcacactcagtttcctgttggcgaccgtggcagtgggaatttatgccatgtaa

SEQ ID NO: 477 - DNA, 870 bp, Homo sapiens; identical to SEQ ID NO: 476

SEQ ID NO: 478 - DNA, 2104 bp, Homo sapiens
tggtatacagcggagatggcgactgcagtccggctgctggggcggcgagtttccagttggagactgcggcctttaccgtcgccccttgctgtcccgcagcgggcccactcgatgttgcctgtggatgatgatatcaacgggctaaacgaggagcagaagcagcttcgtcatacgatatctaagttcgttcaagagaacctggcccccaaggcccaagagattgatcaaagcaatgacttcaagaacctgagagagttctggaagcagctgggaagcctgggagtcctgggcatcacagcccccgttcagtatggtggctctggcctgggctacctagaacatgtgttggtgatggaagagatatcccgggcttcagcagctgtggggctcagctatggcgctcactccaacctctgcatcaaccagattgtccgcaatgggaatgaggcacagaaagagaaatatcttcccaagctcatcagtggtgagttcatcggagccctggccatgagtgagcccaacgctggctctgacgttgtctccatgaggctgaaagcagagaagaaaggagatcactacgttctgaatggcaacaagttctggatcaccaatggccctgacgctgatgtcctagttgtctatgccaagacagacttgactgctgtgcctgcgtctcggggcatcacagccttcattgtggaaaaggatatgcctggtttcagcacctcgaagaagctggacaagctaggcatgaggggctccaacacctgtgagctagtctttgaagactgcaaggttcctgctgctaacatcctgagccaagagagtaagggtgtctacgtactgatgagcgggctggacctagaacgcctggtgctggcaggtggaccccttgggatcatgcaggctgtcctggaccacaccattccctatttgcatgtgagggaagcctttggccagaagatcggccaattccagctgatgcagggaaagatggctgacatgtacacccgcctcatggcatgtcgacagtatgtctacaatgtcgccagggcctgtgacgagggccacatcactgccaaggactgtgctggtgtgattctgtatacagccgagtgtgccacacaagtagccctggatggcattcaatgtttaggtggaaatggctacatcaatgacttccccatgggccgctttcttcgagatgccaaactgtacgagatcggaggtgggaccagtgaggtgaggcggctagtcattggcagagctttcaacgcagacttccgctagcctggggccatcaccctgctcccagcagcaggaggcctttggaagcagagacgtggcagccctctgacttggctaaggaagctctgctgctcaactgccctcttgccagccctctgctcttcgtgaagtcggattctccagccgtgccagccagtcaatcaagaaagcctaaaattcggtccccagctccgaaaaaaaaaaaaaaaaaaaagaaccaaaagaaagcctaaaatggctgctaaaaggactttggcttttctggggtttgcagggagggtaacagtgtctgcgcccttgttctctacttctgaatgtagtaacctcaccctctggggtagcatatgacaggtacccaactccttttcgtgggcaagcctctggcaggggagctctttctgttgcaatgtaacagaggcattgcctctttcaattgtcagatacttgtggtctcttttcttgaggaaaaggcaaaaaccatgtccttcttagctgtttccccaagagctagctagacagttccagaatgcctgtgtggcagacccatgaagggcagagtccacagtctagccaagacaacttggagattggctccctggtgtggctgagtgtctacatcactccgtcacaggctagcactgggcctgctcacgtgaccttctgcagctgcctgactccggtggcccagcttaggttgcctggctcaactccagccttgctgtctatgtatatttctctagacgccctgtggctaattttgttacaaccacacaggctctgctgccattttgtattaaacatactgcaaagtaaaaaa

SEQ ID NO: 479 - DNA, 2104 bp, Homo sapiens; identical to SEQ ID NO: 478

SEQ ID NO: 480 - DNA, 1742 bp, Homo sapiens
gggccttccacaactaaataccaagaagcattctggtctctttagttctagacattaacaagaagacctcaggccccgggtaagacgagagacatgggaaatcacctccaaatctccgtttccctggtgctgtgcatctttatccagtcaagtgcctgtggacaaggcgtgggaacagagccctttgggagaaaccttggagctactgaagaaaggaaaccgttacagaagccagagatcagattcctgctcttcaaagatgaaagtgaccgcctgggttgtcagctcagacctcagcacccggaaacactgcaggagtgtggcttcaacagctcccatccacttgtcatgatcatccacgggtggtcggtggatggcttgctagaaacctggatctggaagatagtgggtgccctgaagtcccgacagtcccaacccgtgaacgtgggattagtggactggatctccctggcataccagcactatgctattgccgtgcgcaacacccgtgttgtgggccaggaggtggctgctcttctcctatggctggaggaatctatgaagttttctcggagcaaagttcacttaattgggtacagcctgggagcacacgtttcaggattcgcaggcagctccatgggtgggaagcgcaagatcggaagaatcacagggctggaccctgcaggacctatgtttgagggaacttcccccaacgagcgcctttctccagatgatgccaattttgtggatgctattcatacctttaccagggagcacatgggtctgagtgtgggcatcaaacagcccattgcccactatgacttctaccccaacgggggctccttccagcctggctgccacttcctggagctctacaaacacattgcagagcatggcttaaatgccataacccagaccatcaaatgtgcccatgagcgttctgtgcacctcttcattgactccttgcaacacagcaacctgcagaacacaggcttccagtgcagcaacatggacagcttcagtcagggtctatgtctgaactgcaagaagggccgttgcaacagtctgggctatgacatccgcagggatcggccacgcaagagcaagacactcttcctcatcacccgagcccagtcccccttcaaagtttatcattaccagttcaagatccagttcatcaatcaaatggagaagccaatagagcctacttttaccatgacactgctggggacaaaagaagaaataaagaaaattcccatcaccctgggcgaaggaattaccagcaataaaacctattccttacttatcacactggacaaagacatcggcgagttgatcatgctcaagttcaagtgggaaaacagcgcagtgtgggccaatgtctggaacacagtgcagaccataatgctatgggacacagagcctcactacgcgggcctcattctgaagaccatctgggtcaaagctggagagacgcagcaaagaatgacattttgccctgataatgtggatgatctccagcttcaccccacccaggagaaagtcttcgtgaaatgtgacctgaagtcaaaagactgaagaagcaaaagagcagatgagtcaagagacccaagcacaaaataaatagactattctttatctgtaatggttgccttattcggaagccaaattacacaaaggatcatgcataaacttaaataaagctgatatgtaaaggaaaaaaaaaaaaaaaaaaaaaaaaa

SEQ ID NO: 481 - DNA, 717 bp, Homo sapiens
atgctcctgcttccactgctcgtccttctctgtgtagtgagcgtgtcctcatcagggtcacaaacctgtgaggaaaccctgaagacttgctctgtgatagcctgcggcagagacgggagagatgggcccaaaggggagaagggagaaccaggtcaagggctcaggggcttgcagggccctccagggaaactggggcctccaggaagtgtaggagcccctggaagtcaaggaccaaaaggccaaaaaggggatcgtggagacagcagagccattgaggtgaagctggcaaatatggaggcagagataaacaccctgaagtcaaaactggagctaaccaacaagttgcatgccttctccatgggtaaaaagtctgggaagaagttctttgtgaccaaccatgaaaggatgcccttttccaaagtcaaggccctgtgctcagagctccgaggcactgtggctatccccaagaatgctgaggagaacaaggccatccaagaagtggctaaaacctctgccttcctaggcatcacggacgaggtgactgaaggccaattcatgtatgtgacaggggggaggctcacctacagcaactggaaaaaggatgagcccaatgaccatggctctggggaagactgtgtcactatagtagacaacggtctgtggaatgacatctcctgccaagcttcccacacggctgtctgcgagttcccagcctga

SEQ ID NO: 482 - DNA, 1761 bp, Homo sapiens
atggatccccgagccccccgccgccgacacacccaccagcgcggctacctgctgacgcgggacccgcatctcaacaaggacttggcttttactctggaagagaggcaacagctgaagattcatggcttgttgccaccctgcattgtcaaccaggagatccaggtccttagagtaattaagaatttcgagcgtctgaactctgacttcgacaggtatcttctgttaatggatctgcaagataggaatgagaagctcttctacagtgtgcttatgtctaatgttgaaaagttcatgcctatcgtttacactcccaccgtgggtcttgcatgccagcaatacagtttggcattccggaagccaagaggcctctttatcagtatccacgacaaagggcatattgcttcagttcttaacgcatggccagaagatgttgtcaaggctattgtggtgactgatggagagcgaatcctcggcttgggcgaccttggttgtaacgggatgggcatccctgtgggtaaactggccctgtacacagcgtgcggaggggtgaatccacaacagtgtctacccatcactttggacgtcggcacagaaaatgaggagttacttaaagatcccttgtatattgggctgcggcacaggcgagtgagaggccctgaatatgatgcgtttttggatgaattcatggaggcagcgtcttccaaatatggcatgaattgccttattcagtttgaagattttgccaatctgaatgcatttcgtctcctgaacaagtatcgaaacaagtattgcacatttaacgatgatattcaaggaacagcgtctgtggcagttgccggccttcttgctgctcttcggataaccaagaacaagctctctgatcagacagtgctgttccagggagccggcgaggctgccttggggattgctcatctgattgttatggccatggagaaggaaggtttatcaaaggagaaagctagacaaaagatatggttggttgactcaaaaggattaatagttaaggggcgtgcttctctcacagaagagaaagaggtgtttgcccatgaacatgaagaaatgaagaacctagaagccattgttcagaagataaaaccaaccgctctcataggagttgctgcaattggtggtgctttcacagaacaaattctcaaggatatggctgccttcaacgagcggcccatcatctttgctttgagtaatccgaccagcaaagctgagtgttctgcagaggagtgctataaagtgaccaagggccgtgcgatctttgccagcggcagtccttttgatccagtcactcttccagatggacggactctgtttcctggccaaggcaacaactcctatgtgttccctggagttgctcttggggtagtggcctgtggactgagacacatcaatgattcggtcttcctcaccacggctgaggtcatatcccagcaagtgtcagataaacacctagaagaaggccggctctatcctcctttgaataccatccgagatgtttccttgaaaatcgcagtaaagattgtgcaagatgcatacaaagaaaagatggccactgtttatcctgaaccccaaaacaaagaagaatttgtctcctcccagatgtacagcactaattatgaccagatcctacctgattgttattcgtggcctgaagaagttccagaaaatacagaccaaagtcaatcagtaacacaacagctagaatttttaactttattaataagatcttga

SEQ ID NO: 483 - DNA, 1761 bp, Homo sapiens; identical to SEQ ID NO: 482

SEQ ID NO: 484 - DNA, 1761 bp, Homo sapiens; identical to SEQ ID NO: 482

SEQ ID NO: 485 - DNA, 1761 bp, Homo sapiens; identical to SEQ ID NO: 482

SEQ ID NO: 486 - DNA, 1998 bp, Homo sapiens
agccctcccatcctgagtgccaacctttcccaaccccgctgctaagctagacacctcactcactgagagccagcatggcagctgttgtcctggagaatggagtcctgagcagaaaactctcagactttgggcaggaaacaagctatattgaagacaactccaatcaaaatggtgccatatctctgatattctcactcaaagaggaagttggtgccctagccaaggtcctgcgcttatttgaggagaacgatatcaacctgacacacattgaatccagaccttctcgtttaaacaaagatgagtatgagttcttcacttatctggataagcgtacgaaacctgttctgggcagcatcatcaagagcctgaggaatgacattggtgccactgtccacgagctttcccgagacaaggaaaagaacacagtgccctggttcccaaggaccattcaggagttggaccgattcgccaatcagattctcagctatggagccgaactggatgcggaccacccaggctttaaagatcctgtgtaccgggcgagacgaaagcagtttgctgacattgcctacaactaccgccatggccagcccatccctcgggtggaatacacagaggaagagaagcagacctggggaacggtgttcaggaccttgaaggccttgtataaaacacatgcctgctacgagcacaaccacattttcccacttctggaaaagtactgcggtttccgtgaagacaacattccacagctggaagatgtttctcaatttctgcagacttgtactggtttccgcctccgacctgttgctggcttactgtcatctcgagatttcttgggtggcctggccttccgagtcttccactgcacacagtacattaggcatggatcgaagcccatgtacacacctgaacctgacatctgccatgaactcttgggacatgtgcctttgttttcagatcgcagctttgcccagttttctcaggaaattgggcttgcatcactgggggcacctgatgagtacattgagaaactggccacaatttactggtttactgtggagtttgggctttgcaaggaaggagattctataaaggcatatggtgctgggctcttgtcatcctttggagaattacagtactgtttatcagacaagccaaagctcctccccctggagctagagaagacagcctgccaggagtattctgtcacagagttccagcccttgtactacgtggcggagagtttcagtgatgccaaggagaaagtgaggacttttgctgccacgatccctcggcccttctcggttcgctatgacccttacactcaaagggttgaggtcctggacaatactcagcagttgaagattttagctgactccattaatagtgaggtcggaatcctttgcaatgccctgcagaagataaagtcgtgagcagaaaatgacgtcatgggcagaacttaggaggtcaaccagaaatcggtcgatagaagtatagtaactgcctttgttcccctgaagaaaaaaagttttatttgaaacgtcagcttttattatttttgctaacacagtggagcatcaccaaataaatcaaagttctctgaaatgaaagtgtgttaaaaccctccaggggtagatctttcagaatcacatttgatttagataatctcatagcttcaatttggtttaaaatgtaattttctcagctctcatcaacattcatcaaatttggggcttgtgtcattggggcttcatccgttcatttttaacctctcaggtaagctctgaaggaacacatttggctgagtgtaaaatgtaagactgccatcagggatgaatcattccgttcagtacagattgtaatctacaaagggtagttttcaccttcgttcattatggctctgagaactgctttgttagcctgcttacataaatctcccctgatcggagaccctattaagatagttacaagcaataaagttttagagcattatat

SEQ ID NO: 487 - DNA, 1898 bp, Homo sapiens
cgcccacttgtacatctgggagcagaagaaaaagagggagctggagataatctgtgagaggctccgaagcccagtacatccccctgactcagccctcgcccacctcgctgctgtgactacagcaacagacaagacagctaggaagataggaagtgaggtccaataccttgtgggcagtggtgtcattagctgcaacgctaagatgtctcgagagatgggagaactcactcaaaccaggttacagaagatctggattccacacagcagcagtagcagcgtgctgcaacggcgaaggggctcctccataccacagttcactaattctcccacgatggtgatcatggtgggtttaccagctcgaggcaagacctacatctctacgaagctcacacgctatctcaactggataggaacaccaactaaagtgtttaatttaggtcagtatcgacgagaggcagtgagttacaggaactatgaattctttcgcccagacaacacagaggcccagcttatcaggaagcagtgtgctctagcagccctaaaggatgtccataagtatctcagccgcgaggaaggtcatgttgcggtttttgatgccaccaactataccagagaacggagatcgttgattctacagtttgctaaggaacatggttataaggttttttttattgagtctatttgtaatgaccccgaaattattgcagaaaacatcaagcaagtgaaacttggtagtcctgattacatagactgtgaccaagaaaaggttttggaagactttctaaagagaatagagtgctatgagatcaactaccaacctttggatgaggaattggacagccacctgtcctacatcaagatcttcgacgtgggcacacgctacatggtaaatcgagtgcaggaccacgttcagagccgtacagcctactacctcatgaacatccatgtcacacctcgatctatctacctatgccgccatggtgagagtgaactcaaccttagaggccgcattggaggtgactctggcctctcagctcggggcaagcagtatgcctatgcactagccaacttcatccggtctcaaggcatcagctccctgaaagtatggactagccacatgaagaggaccattcagaccgctgaagccctaggtgtcccctatgaacagtggaaggccctgaatgagattgatgcgggtgtctgtgaagagatgacctatgaagaaattcaggaacactaccctgaggaatttgcactacgggaccaggataaatatcgttaccgctatccgaagggagagtcctatgaggatctggttcagcgtcttgaaccagttataatggagctagaacggcaagaaaatgtactggtgatctgtcaccaggctgtcatgcggtgcctcctggcatacttcctggataaaagttcagatgagctgccctatctcaagtgtcctctgcatactgtgctcaaactcacacctgtggcttatggctgcagagtggagtccatctacctgaatgtggaggctgtgaacacacaccgggacaagcctgagaatgtggacatcacccgtgaagctgaggaagccttggacactgtacctgcccattactgagccttttcaagtgatcagattgtctctgtgctcacccccttcctcctgtaggagctgctgcccttgttctcgcttaagcagactctggctatggcctgagagtgccctacctccagtgaagaagtccgtagcagctcccaaacaggtctcaattcctagccacaactaaggcacctacctagttgtggataaagttccgttttaaatattctctgataaataaagatgtttatttctgcctataggacaggaagaggttataaagcttctttcattgcgg

SEQ ID NO: 488 - DNA, 1898 bp, Homo sapiens; identical to SEQ ID NO: 487

SEQ ID NO: 489 - DNA, 3888 bp, Homo sapiens
cgcgaaggaaacccggagtgtcacgtgaggtcgtgatggagtttgaagagggccttaacggaacagcagacaagaacttctcaaagatgggcaaaaagagtaaaaaggagaaggagaagaaacctgctgttggcatattcgggatgtttcgctatgcagattggcttgacaagctgtgcatggctctgggaactctcgctgctatcatccacggaaccctgcttcccctcctgatgctggtgttcggatacatgacagatagttttacccaagcagagacccgcattctgccgagcgttactaatcaaagtgaaatcaacagtacacagaccgtcagcgacagcagtctggaggaggacatggccatgtacgcctactattacacgggcattggtgccggtgtgctcatcgttgcctacatccaggtttcactttggtgcctggcagctgggagacaaatacacaagattaggcagaagtttttccatgccatcatgaatcaggagataggctggtttgacgtgaatgacgctggggagctcaacacccggctcacagatgacgtctccaaaattaatgacggaattggtgacaaacttggaatgttctttcagtccataacgacattttcagccggttttataataggatttataagtggttggaagctaacccttgtaattttggccgtcagccctcttattgggttgtcatctgccatgtgggcaaaggtactgacttcatttactaataaggaactccaggcttatgcgaaagctggagcagttgccgaagaagtcttagcagccatcagaactgtgattgcatttggaggacaaaagaaggaacttgaaaggtacaataaaaatttagaagaagctaaaagagttggcataaagaaagccatcacggccaacatttccataggtattgcctacctgttggtctatgcgtcttatgcactggcattctggtatgggacctccttggtcctctcaaatgaatattctattggacaagtgcttaccgtcttcttctctattttattggggactttcagtattggacatttagccccaaacatagaagcctttgcaaatgcaagaggggcagcctatgaaatcttcaagataattgataatgagccaagcattgacagcttctcaaccaagggacacaaaccagacagtataatgggaaatttggaatttaaaaatgtttacttcaactacccatcacgaagtgaagttaagatcttgaagggcctcaacctgaaggtgaagagcgggcagacggtagccctggttggcaacagtggctgtgggaaaagcacaactgtccagctgctgcagaggctctacgaccccatagagggcgaggtcagtatcgacggacaggacatcaggaccatcaatgtgaggtatctgcgggaaatcattggggtggtgagtcaggaacccgtgctgtttgccaccacgattgccgaaaacattcgctatggccgagaaaacgtcaccatggatgagatagagaaagctgtcaaggaagccaatgcctatgacttcatcatgaaactgccccacaaatttaacaccctggttggtgagagaggggcgcagctgagtgggggacagaaacagaggatcgccattgcccgggccctggtccgcaaccccaagatccttttgttggatgaggccacgtcagccttggacacagaaagcgaagccgtggttcaggccgctctggataaggctagagaaggccggaccaccattgtgatagctcaccgcttgtctacagtgcgcaatgctgacgtcattgctggttttgatggtggtgtcattgtggagcaaggaaatcatgaagagctcatgaaagagaagggcatttacttcaaacttgtcatgacacagactagaggaaatgaaattgaaccaggaaataatgcttatgaatcccaaagtgacactggtgcctctgagttgacttcagaaaaatcaaaatctcctttaataaggagatcaattcgcagaagtatccacagaagacaagaccaggagagaagacttagttcgaaagaggatgtggatgaagatgtgcctatggtttccttttggcagatcctaaagctaaatattagtgaatggccctatttagttgtgggtgtactttgtgctgttataaatgggtgcatacaaccagtgtttgccatagtgttttcaaagattgtaggggttttttcaagagacgacgaccatgaaaccaaacaacggaattgtaacttgttttcccttctctttctggtcatgggaatgatttcttttgttacgtacttctttcaaggcttcgcatttggcaaagctggagagatcctcaccaagcgactccgatacatggtcttcaaatccatgctgcgacaggatataagctggtttgatgaccataaaaacaccactggctcgctgactaccaggctcgctagtgacgcttctaatgttaaaggggctatgggctccaggcttgctgtagttacccagaatgtagcaaaccttggcacaggaattatcttatccttagtctatggctggcagcttacacttttacttgtagtaattataccactcattgtcttgggtggaattattgaaatgaaactgttgtctggtcaagccttgaaggacaagaaagagctagagatctctgggaagatcgctacagaagcaattgaaaacttccgcactgttgtctctttgactcgggagcagaagtttgaaactatgtatgcccagagcttgcagataccatacagaaatgctttgaagaaagcacacgtctttgggatcaccttcgccttcacccaggccatgatttatttctcctatgctgcttgtttccggttcggtgcctacttggtggcacgagaactcatgacatttgaaaatgttatgttggtattttctgctgttgtctttggtgccatggcagcagggaataccagttcattcgctcctgactacgcgaaggccaaagtctcagcatcccacatcatcaggatcattgagaaaatccccgagattgacagctacagcacggagggcttgaagcctaattggttagaaggaaatgtgaaatttaatggagtcatgttcaactatcccacccgacccaacatcccagtgcttcagggactgagcttcgaggtgaagaaggggcagacgctcgccctggtgggcagcagtggctgcgggaagagcacggtggtccagctgctcgagcgcttctacaaccccatggctggaacagtgtttctagatggcaaagaaataaaacaactcaacgtccagtggctccgcgcccacctgggcattgtgtcccaggagcccatcctgtttgactgcagcatcaccgagaacatcgcctacggagacaacagccgtgtcgtgtctcatgaggagatcgtgagggccgccagggaggccaacatccaccagttcatcgactcactgcctgagaaatacaacaccagagtgggagacaaagggactcagctgtcgggcgggcagaagcagcgcatcgccatcgcgcgcgccctcgtcagacagcctcacatcttacttctggatgaagcgacatcagctctggatacggagagtgaaaaggtcgtccaggaagcgctggacaaagccagggaaggccgcacctgcattgtgatcgcgcaccgcctgtccaccatccagaacgcagacttgatcgtggtgattcagaacggccaggtcaaggagcacggcacccaccagcagctgctggcccagaaaggcatctatttctcgatggttcaggctggagcaaagcgctcatgagctgggagtatttgaggtgctaagt

SEQ ID NO: 490 - DNA, 2925 bp, Homo sapiens
gaaccaacgtagcagcatggaagggccagcgggataccttcgacgtgcgagtgtggctcaactgacccaggagctgggcactgccttcttccagcagcagcaactgcccgcagctatggcggacaccttcctggaacacctctgccttctggatatcgactcacagcctgtggctgctcgtagcaccagcatcattgccaccattgggccagcatcccgctctgtggaccgcctcaaggagatgatcaaagcagggatgaacattgcacgactcaacttctcccatggctcccatgagtaccatgcagaatccatcgccaacatccgggaggcaactgagagttttgcaacctccccactcagctacagacctgtggccatcgccctggacaccaagggacctgagatacgaaccggagtcttgcaggggggtccggagtcggaggtggaaattgtgaagggctcacaggtgctggtgacggtggacccgaagttccagacaaggggtgatgcaaagacagtgtgggtggactaccacaatatcacccgggtcgttgcagtggggggccgcatctacattgacgacgggctcatctccttagtggtacagaaaatcggcccagagggactggtgacagaagtggagcacggtggtatcttgggcagcaggaagggtgtgaacttgccaaacactgaggtggacctgcccgggctgtctgagcaagaccttttggatctgcgcttcggggtgcagcataatgtggacatcatctttgcctcctttgtgcggaaagccagtgacgtgttagcagtccgggatgccctggggccagaaggacagaacatcaaaattatcagcaaaatcgagaaccatgaaggcgtgaagaagtttgatgaaattctagaagtgagcgatggcatcatggtggcacggggtgacctgggcattgagatccctgcggagaaggttttcttggctcagaagatgatgattggacgctgcaacctggccggcaagcctgtcgtttgtgccacacagatgctggagagcatgatcactaaggctcgaccaactcgggcggagacaagcgatgtggccaatgccgtgctggatggggctgactgtatcatgctgtccggagagaccgccaagggcagttttcctgtggaagctgtaatgatgcaacatgcgattgcgcgggaggcagaggccgctgtgtaccaccgccagttgtttgaggagctacgccgggcagcgccgctgagccgtgacccaactgaggtcactgcgattggagccgtggaggcttccttcaagtgctgtgcagcagccatcatcgtgctgacgaagactggccgttcagcccagcttctatctcaataccgacctcgggcggctgtcattgctgtgactggatctgccaaggctgcccgacaggtccacctgtcccgaggagtcttccccttgctctaccgtgagcctccagaggccatctgggcagatgatgtggatcgaagggtccaatttggcattgaaagtggaaagctccgtggtttcctccgtgtgggtgatctggtgattgtggtgacaggttggcggcctggctctggctataccaacatcatgcgggtgctgagcgtatcctgaaatgcctctccccattctgacccagttacaccctatttctttcaacccacacccctcccatagtcctacatctgccatctagccccatccctgtgctttacacaggccctgaatgtctgtgtccaattatacagtgccaccggcagcatcggttgtatatccctgtctcaatccgctcagctggactctaagataccctgagcctttaatcccagcccagctggttgattcgattccttccgggtcccaatcattggaatgggggagtggaaacagggtgatcttgtccaattttcatacaatcatgattttaaaacactgtctgatataaccctcatgatcagtttcctagcaaagtgtcatctcctaatggcctcaagtcagggcagaatactccttcaaggagcacagctccacactttagggaaggctggggcagctgggtactggagagaactaagacaggctggcttttctctctctctctttttttttttttcttttctttttctttttttcggagctggggaccgaacccagggcattgtgttgctaggcaagcgctctaccactgagctaaatccccaaccccagcttttctctttttaatacaagctctcactggcctcaaactcctaagtcctcctgcctggccctcctaagggtagggactacaggcatgagtgaccagctggacttcgggtagccttattttcttactgactccacaaaccatggttgttctcctgcccactgctctgctgggtcagatgatccagaaattcttccacaaccacttggctcccacatacaaattagaagcaaaactgaatcttttcttttaaacccaactgtttaggtgcaattataaaaacaactccacaggcaaagaatcccagaatctcctaccctaggagatgtatagtcctggccccacccatcaatgctgtagtatactcctgaagcgggacagaactggtggacaggggactcctcttgtccctaagaaagtggaggcactgttggcccacccctcctaggtttgaatactccaggccctcctcttcagcaccaacagcaaatccagatgagaaaaaaaaaataagtgcagttctcctgctgccctcctcttttcactacctcaatacagcaagtttgagtattgctgctgatggcagtgtgcaaggaccacaaagatgtcccccctcagccccctaccagaaggtggagaggacagaggaatgaataataaagtgaatgcgtcaaattagcaaatg

SEQ ID NO: 491 - DNA, 4127 bp, Homo sapiens
agccgctgctggggaggttggggctgaggtggtggcgggcgacgggcctcgagacgcggagcgacgcggcctagcgcggcggacggccgagggaactcgggcagtcgtcccgtcccgccatggaaatggagaaggaattcgagcagatcgataaggctgggaactgggcggctatttaccaggatattcgacatgaagccagtgacttcccatgcagaatagcgaaacttcctaagaacaaaaaccggaacaggtaccgagatgtcagcccttttgaccacagtcggattaaattgcatcaggaagataatgactatatcaatgccagcttgataaaaatggaggaagcccagaggagctatatcctcacccagggccctttaccaaacacgtgcgggcacttctgggagatggtgtgggagcagaagagcaggggcgtggtcatgctcaaccgcatcatggagaaaggctcgttaaaatgtgcccagtattggccacagaaagaagaaaaagagatggtcttcgatgacaccaatttgaagctgacactgatctctgaagatgtcaagtcatattacacagtacggcagttggagttggagaacctggctacccaggaggctcgagagatcctgcatttccactacaccacctggcctgactttggagtccctgagtcacctgcctctttcctcaatttcctattcaaagtccgagagtcaggctcactcagcccagagcacggccccattgtggtccactgcagtgctggcattggcaggtcagggaccttctgcctggctgacacctgcctcttactgatggacaagaggaaagacccgtcctctgtggacatcaagaaagtgctgttggagatgcgcaggttccgcatggggctcatccagacggccgaccaactgcgcttctcctacctggctgtgatcgagggtgcaaagttcatcatgggcgactcgtcagtgcaggatcagtggaaggagctttcccatgaagacctggagcctccccctgagcacgtgcccccacctccccggccacccaaacgcacattggagcctcacaatggcaagtgcaaggagctcttctccaaccaccagtgggtgagcgaggagagctgtgaggatgaggacatcctggccagagaggaaagcagagccccctcaattgctgtgcacagcatgagcagtatgagtcaagacactgaagttaggaaacggatggtgggtggaggtcttcaaagtgctcaggcatctgtccccactgaggaagagctgtccccaaccgaggaggaacaaaaggcacacaggccagttcactggaagcccttcctggtcaacgtgtgcatggccacggccctggcgactggcgcgtacctctgttaccgggtatgttttcactgacagactgctgtgaggcatgagcgtggtgggcgctgccactgcccaggttaggatttggtctgcggcgtctaacctggtgtagaagaaacaacagcttacaagcctgtggtggaactggaagggccagccccaggaggggcatctgtgcactgggctttgaaggagcccctggtcccaagaacagagtctaatctcagggccttaacctgttcaggagaagtagaggaaatgccaaatactcttcttgctctcacctcactcctcccctttctctggttcgtttgtttttggaaaaaaaaaaaaaagaattacaacacattgttgtttttaacatttataaaggcaggtttttgttatttttagagaaaacaaaagatgctaggcactggtgagattctcttgtgccctttggcatgtgatcagattcacgatttacgtttatttccgggggagggtcccacctgtcaggactgtaaagttcctgctggcttggtcagcccccccacccccccaccccgagcttgcaggtgccctgctgtgaggagagcagcagcagaggctgcccctggacagaagcccagctctgcttccctcaggtgtccctgcgtttccatcctccttctttgtgaccgccatcttgcagatgacccagtcctcagcaccccacccctgcagatgggtttctccgagggcctgcctcagggtcatcagaggttggctgccagcttagagctggggcttccatttgattggaaagtcattactattctatgtagaagccactccactgaggtgtaaagcaagactcataaaggaggagccttggtgtcatggaagtcactccgcgcgcaggacctgtaacaacctctgaaacactcagtcctgctgcagtgacgtccttgaaggcatcagacagatgatttgcagactgccaagacttgtcctgagccgtgatttttagagtctggactcatgaaacaccgccgagcgcttactgtgcagcctctgatgctggttggctgaggctgcggggaggtggacactgtgggtgcatccagtgcagttgcttttgtgcagttgggtccagcagcacagcccgcactccagcctcagctgcaggccacagtggccatggaggccgccagagcgagctggggtggatgcttgttcacttggagcagccttcccaggacgtgcagctcccttcctgctttgtccttctgcttccttccctggagtagcaagcccacgagcaatcgtgaggggtgtgagggagctgcagaggcatcagagtggcctgcagcggcgtgaggccccttcccctccgacacccccctccagaggagccgctccactgttatttattcactttgcccacagacacccctgagtgagcacaccctgaaactgaccgtgtaaggtgtcagcctgcacccaggaccgtcaggtgcagcaccgggtcagtcctagggttgaggtaggactgacacagccactgtgtggctggtgctggggcaggggcaggagctgagggtcttagaagcaatcttcaggaacagacaacagtggtgacatgtaaagtccctgtggctactgatgacatgtgtaggatgaaggctggcctttctcccatgactttctagatcccgttccccgtctgctttccctgtgagttagaaaacacacaggctcctgtcctggtggtgccgtgtgcttgacatgggaaacttagatgcctgctcactggcgggcacctcggcatcgccaccactcagagtgagagcagtgctgtccagtgccgaggccgcctgactcccggcaggactcttcaggctctggcctgccccagcacaccccgctggatctcagacattccacacccacacctcattccctggacacttgggcaagcaggcccgcccttccacctctggggtcagcccctccattccgagttcacactgctctggagcaggccaggaccggaagcaaggcagctggtgaggagcaccctcctgggaacagtgtaggtgacagtcctgagagtcagcttgctagcgctgctggcaccagtcaccttgctcagaagtgtgtggctcttgaggctgaagagactgatgatggtgctcatgactcttctgtgaggggaacttgaccttcacattgggtggctttttttaaaataagcgaaggcagctggaactccagtctgcctcttgccagcacttcacattttgcctttcacccagagaagccagcacagagccactggggaaggcgatggccttgcctgcacaggctgaggagatggctcagccggcgtccaggctgtgtctggagcagggggtgcacagcagcctcacaggtgggggcctcagagcaggcgctgccctgtcccctgccccgctggaggcagcaaagctgctgcatgccttaagtcaatacttactcagcagggcgctctcgttctctctctctctctctctctctctctctctctctctctctctctctctaaatggccatagaataaaccattttacaaaaataaaagccaacaacaaagtgctctggaatagcacctttgcaggagcggggggtgtctcagggtcttctgtgacctcaccgaactgtccgactgcaccgtttccaacttgtgtctcactaatgggtctgcattagttgcaacaataaatgtttttaaagaac

SEQ ID NO: 492 - DNA, 4127 bp, Homo sapiens; identical to SEQ ID NO: 491

SEQ ID NO: 493 - DNA, 1687 bp, Homo sapiens
tcaatcctcactggccactatgctggacacaggactgcttctggtggtcatattggcctccctgagcgtcatgctcttggtgtccctctggcagcagaaaatcagggggagattgcctccaggacccactcctttgcctttcattggaaattatctgcagctgaatacaaaagacgtatacagttccatcacacagctcagtgagcgctatggtcctgtgttcaccatccaccttgggcctcgccgggttgtggtgctttatggatacgatgcagtcaaagaggctttggtggaccaagctgaggagttcagtggacgaggcgaacaggctacctacaatacactcttcaaaggctatggcgtggcattcagcagtggggagcgggcaaaacaactcaggcgcctctctatagccacattgagagattttggtgtgggcaagcgtggtgtagaggagcgtatcctggaggaggcaggctatttgatcaagatgttgcagggcacttgtggagcccccattgaccccaccatctacctgagcaaaacagtctccaatgttattagctccattgtcttcggggaacgcttcgactatgaggacacggagttcctgtcactgctgcagatgatgggtcaaatgaacagatttgcagcttcacccacagggcagctctatgacatgttccattcagtgatgaagtacctgcctggaccacagcaacagatcatcaaggttactcagaaactggaagacttcatgatagagaaagtgaggcagaaccatagtaccctggaccccaattccccaaggaacttcattgactcctttctcatccgcatgcaagaggagaaaaatggcaattcagagttccacatgaagaacctagtgatgacaacactaagcctcttctttgctgggtctgagacagtcagctccacactacgctacggcttccttctactcatgaagcatccagatgtggaggccaaggtccatgaggaaattgagcaggtgatcggcaggaaccgacagcctcagtatgaggaccacatgaagatgccctacacccaggctgtgatcaatgagatccaaagattttctaacttggctcccttgggcattcctcgaaggattatcaagaacacaaccttccgtggcttcttcctccccaaggccaccgatgtgttccctatattaggttctctgatgacagacccaaagttcttccctagccccaaagacttcgacccccagaacttcctggatgacaagggacagttgaagaaaaatgctgctttcctccctttctccactgggaagcgattctgcttgggagatggcctggctaagatggagctcttcctgctgctcaccactattttacagaacttccgtttcaagttcccaatgaaactagaagacatcaacgagtcccccaaacccttggggtttaccaggatcataccaaagtacaccatgagcttcatgcccatctgattctgagttgaatcaaggtggggcaagagggagagagagcctgaagtggggccagggtgcaggtggagagaacaggggaggtgaagatgagggttaagaagggaccacacccatggaagaaacacaaaagacttctcactttggtaaaattgtaacagtcctaataaaaagaaagaaatactcagtcgg

SEQ ID NO: 494 - DNA, 1687 bp, Homo sapiens; identical to SEQ ID NO: 493

SEQ ID NO: 495 - DNA, 1066 bp, Homo sapiens
ctggaatcctaacaggacctacacagagctatttataatgccagactatacttggtttgaaggaataccttttcctgcctttgggattccaaaagaaactttgcaaaatgtttgtaataagtttgtggtgaaagaagaagatttgatcttattgacttatcccaagtcaggaacgaactggctgattgaaattgtctgcttgattcagaccaagggagatcccaagtggatccaatctgtgaccatctgggatcgctcaccctggatagagactgatttaggatatgatatgttaatcaaaaagaaaggaccacgactcataacctcccatcttcccatgcatcttttctccaagtctctcttcagttccaaggccaaggtgatctatctcatcagaaatcccagagatgttcttgtttctggttattatttctggggtaagacaactcttgcgaagaagccagactcactgggaacgtatgttgaatggttcctcaaaggaaatgttccgtatggatcatggtttgagcacatccgtgcctggctgtctatgcgagaattagacaacttcttgttactgtactatgaagacatgaaaaaggatacaatgggaaccataaagaagatatgtgacttcctggggaaaaaattagagccagatgagctggatttggtcctcaagtacagttccttccaagtcatgaaagaaaacaacatgtccaattataatctcatggagaaggaactgattcttcctggttttactttcatgagaaacggcactactggggactggaagaatcacttcactgtagcccaagctgaagcctttgataaagtgtttcaggagaaaatggccggtttccctccagggatgttcccatgggattaaaatttcaaaagttttaaatattttatgaacattgatttttatgtttctgttgttctatgtctgaataagtgaatgtggtcattgaataaattctattctggcattgtgaaaaaaaaaaaaaaaaaaaaaaaaaaaaaaaaaaaaaaaaaaaaaaaaaaaaaaaaaaaaaaaaaa

SEQ ID NO: 496 - DNA, 1066 bp, Homo sapiens; identical to SEQ ID NO: 495

SEQ ID NO: 497 - DNA, 1066 bp, Homo sapiens; identical to SEQ ID NO: 495

SEQ ID NO: 498 - DNA, 1882 bp, Homo sapiens
gcaggcctggctaaactggtgagggccctacccagccatgcccaccgtggatgatgtcctggagcaagttggagagtttggctggttccagaaacaagccttcctgttgctatgcctgatctcagcttctttagctcccatctatgtgggcatcgtcttcctgggcttcacccctggacattattgccagaatcctggggtggctgagctgagccagcggtgtggctggagccaggcagaggagctgaactacactgtgccgggcctgggaccttcggacgaggcctccttcctcagccagtgcatgaggtatgaggtggactggaaccagagcacccttgactgtgtggacccactgtccagcctggttgccaacaggagtcagttgccattgggcccctgcgagcatggctgggtatacgacactcccggctcctccatcgtcactgagtttaacctggtgtgtggagacgcctggaaagtggacctttttcagtcctgtgtgaacttgggcttcttcctgggctccctggttgtgggttacattgcagacaggtttggccgtaagctctgtctcttggtgaccacgctggtcacatctgtgtccggtgtgctaacagcggtggccccagactatacatccatgttgctctttcgcctgctgcagggcatggtcagcaagggcagctgggtgtccggctataccttgatcacagagtttgtcggctctggctacaggagaacgacggccattttgtaccagatggccttcacagtggggctagtggggcttgccggggtggcctatgccattccagactggcgctggctccagctagctgtgtccctgcctaccttcctcttcctgctgtattactggtttgtcccagaatccccccggtggctgttgtcccagaagagaaccacgcgagctgtcaggataatggagcaaattgcacagaagaacgggaaggtgcctcctgctgacctgaagatgctctgccttgaggaggatgcctcagaaaagcgaagtccttcgtttgccgacctgttccgcactcccaacctgaggaagcacaccgtcatcctgatgtatctatggttctcttgtgctgtgctgtaccagggtctcatcatgcacgtgggagccacaggggccaacctctacctggacttcttttattcttctctggtggaattccccgcggccttcatcatcctggtcaccattgaccgcattggccgcatctacccaatagcggcctcgaatctggtgacgggggcagcctgcctcctcatgatctttatcccgcatgagctgcactggttgaacgttaccctcgcctgtcttggccgtatgggggccaccattgtgctgcagatggtctgcctggtgaacgctgagctgtaccctacattcatcaggaatcttgggatgatggtatgctctgccctgtgtgacctgggtgggatcttcacccccttcatggtgttcaggctgatggaagtttggcaagccctgcccctcattttgtttggggttttgggcctgactgctggggccatgactcttcttctcccagagaccaagggtgtggctttgcctgagactattgaagaagcagagaacctggggaggaggaaatcaaaggccaaagaaaacacgatttaccttcaggtccaaacaggcaagtcctcaagtacctgacagggatgctgtgccaggagctgagtggcagagagaaaggaggacttgccacttggaggattcccagaagcctttgcctttccagactcttgtatatatgcaccaggttccaaatgaactaccaaccttaaagacttttctgaaagcccaaaaaaaaaaaaaaaaaaaaaaaaa

SEQ ID NO: 499 - DNA, 1882 bp, Homo sapiens; identical to SEQ ID NO: 498

SEQ ID NO: 500 - DNA, 3320 bp, Homo sapiens
gaattcggcacgagctgcgaagtgactggtcggtcgtgtaggtgctgcagccaacgagcccggtggcgggcaagggacacgagcaggacccccggctccgaagaattgcggcccgcgccgccgcgtcacgcacactctgggcgccgcgagatacacataacgatactaggttttcgccgcatcttggaattcatcgacacctaagatgccacctgcgattggcgggccagtggggtacacccccccagatggaggctggggctgggcggtggtagttggagccttcatttctattggcttctcctatgcatttcccaaatccatcactgtcttctttaaagagattgaaattatattcagtgcaacgaccagtgaagtgtcatggatatcgtccatcatgctggctgtcatgtatgccggaggtcctatcagcagtatcttggtgaataaatatggcagccgtccagtaatgattgctggtggctgcctgtctggctgtggcttgattgcagcttctttctgtaacacggtgcaggaactttacttctgcattggtgtcattggaggtcttgggcttgctttcaacttgaacccagctctgactatgattggcaagtatttctacaagaagcgaccattggccaatggcctggctatggcaggcagcccagtgttcctctctaccctggctccacttaatcaggctttctttggtatttttggctggagaggaagcttcctaattcttgggggcctcctcctcaactgttgtgtagctggatccctgatgcgaccaatagggcctcagcaaggcaaggtggaaaaactcaagtccaaagagtctctccaggaagctgggaagtctgatgcaaatacagatctcattggaggaagtcccaaaggagaaaagctgtcagtcttccaaacagttaataaattcctggacttgtccctgtttacccatagaggctttttgctgtacctgtctggaaatgtggtcatgttctttgggctctttacccctttggtctttcttagtaattatggtaagagtaagcatttttccagtgagaagtcagccttcctcctttccattttggcttttgttgatatggtggccagaccgtccatgggtcttgcagccaacaccaggtggatcagacctcgagtccagtacttttttgctgcttctgttgttgcgaatggagtgtgccatttgctggcacctttgtctacgacctatgttgggttctgcatctacgcgggagtctttggatttgcctttggttggctcagctccgtattgtttgagacgttgatggacctcgttggaccccagaggttctccagtgctgtgggcttggtgaccattgtggaatgttgtcctgtcctcctgggaccaccacttttaggccgcctcaatgacatgtatggagactacaaatacacatactgggcttgtggcgtgatcctcatcatcgcaggcctctacctcttcattggtatgggcatcaattatcgacttgtggccaaagaacagaaagcggaggaaaagaagagggacggtaaagaggacgagaccagcactgatgttgatgagaagcccaagaagacaatgaaagaaacacagtcgccagcgccactgcagaacagctctggagaccccgcggaggaggagagcccagtctgacctgtggagcatgaagagagcaggtgtgacccgagacatccgaaaccattctgctggcccctagtctaccagtggtgccccgtgcagacagtggacaattgtgtggaaaacccaccagggtgttcattggtgggatttttttttttcactccttaccaatgcctggatttaaaatatactctgctttaggtagggagtggttgacaaagaatatggggaagaagcagtgatctgtttgtttgtttgtttgtttgtttgtttgtttgttttaatcttagcttttaacagtgtcatgaagattataatatgtgccttaagttttagtttttagaactctttagagagccttaacttttaaaaccattctgctgaattcatctgtttaaaacgtcattttaagaggaaaaataacaactagcttgcttgaggtaactaaccttaatcttgttttgttgttgttgtaatgctttgtcagacagacattgttaccggaacatttatgaatagaaatactgcttaaaggtcacaggtttataaaatactgagctaaagtatttttctagcattatagttgcctggtacatctgctgctaggtatatatttgagaaatttgaagcataaaattctggatcttggcagttccagccacagcctgtcacctgctgggcacctcttctggaatgctcactacagtctagtgctaaggtgttgccactgaattgatacctttgctcctattcagagacactgtgtggttagaagtaattggccatttttgaaatcaaatgcaaaaagttagtattaaaatctacaaaacaattccttaacacgtctgatttaatgtaaacagtatttcaagcatcagctgaattcagcgtaggttgtcccaaaaccttagttatggtgtgatactctgggtatgtgtgggtttgaggggctgtgagtgaggtcttggttcttaggattgacccagggccatgagcatgcgaagtacatgctgtacggccgagccacaacccacaggcaccctggagtcctcctagtccctgagaccttttctctgatttttgatagctcatttatttactgatagtttagagctgtatgtgagatatccagtacagggtgaatgtatgcgctctttgttttttacattgttttcagtatttgcaaaaccgagagggtcagtgtttggcctcagggaagccaataaagataaaatagggtggaagtttgcagactttcagtaagtacccacctcccgccacacacaccagacttacaggggaacttctatcatgcttacgattatttgacgcagtcttacctccacatcttaactttcacgaccctttcacttacctgacatgtagaaaaatgggtttaatatatggataggaggaaagatggaccagattggaattacagtgggttttttttttttaaacctgatgttttctgaatagaggcagaaaaaataagacatatgacactgaattggacgatgcatttaaaataccattgtaatgacagggtgaatacagatttacaaccttgtgtaagaagctgactttttccaaataaaacatttattttatttttagaaaaaaaaaaaaaaaaaaactcgag

SEQ ID NO: 501 - DNA, 3320 bp, Homo sapiens; identical to SEQ ID NO: 500

SEQ ID NO: 502 - DNA, 1698 bp, Homo sapiens
ccttaaaagggggtaaagctgcactttaagggaccaggttcccagtctgttgtaagaggatctttcctgattctaagtgtctggacaagtattccttcaaaagcctgcaagccgtggggcagccatggggctgctgattggagatgacctctgggctgtggtcatattcacagccatcttcttgcttctggtggacctggtgcaccggcacaaattctggactgcccactaccctcccggccctgtgccactccctgggctgggaaacctgctgcaggtggactttgagaacatgccatatagcttatacaagcttcgaagccgctatggtgacgtgttcagcctacagatagcctggaagcctgtagttgtgatcaacgggctgaaggccgtgcgggaactgctggtgacctatggagaggacactgctgaccgccccctactgcccatctataatcacctgggctatggggacaaatcaaaaggtgtggtccttgcaccttacggacctgagtggcgagagcagagacgattctctgtgtccaccctgcgtgacttcggcgtgggcaagaaatcgctggagcagtgggtgacagaggaggccggccacctctgtgacaccttcgccaaggaggctgaacatcccttcaatcccagcatcctcctgagtaaggctgtgagcaacgtgattgcctcccttgtttatgctcgtcgatttgagtatgaggaccctttcttcaacaggatgctcaaaacattgaaggagagctttggagaggacaccggcttcatggcagaggtgctgaacgcaatcccaattctccttcagattcctgggctgcctggcaaagtcttccccaagctcaattcatttatagccttagtggataagatgttaattgagcacaagaaaagctgggatcctgcccagccgccccgagacatgactgatgccttcctagcagagatgcaaaaggccaaggggaatcctgagagcagcttcaatgatgaaaatctgcgcttggtggtgattgacctgttcatggcggggatggtgaccacctcaaccacactgtcctgggcccttctgctcatgatcctgcatccagatgtgcagcgccgagtccacgaggagattgatgaggtcatagggcaggtgcgtcgtccagagatggcagaccaggcacgaatgccgttcaccaatgctgtcatccatgaggtgcagcgctttgcagacatcgtcccgacaaatataccacatatgacatcccgagacattaaattccaaggcttcctcatccccaaggggacaaccctcatccccaacctgtcctccgtgctgaaggatgagactgtctgggagaagcccctccgcttccatccagaacacttcctggatgcccagggcaactttgtgaagcatgaggccttcatgccattctcagcaggccgcagagcatgcctgggggagcccctggcccgcatggagctcttcctcttcttcacctgcctcctgcagcgcttcagcttctcggtgctggccggccggccccggcccagcacccatggcgtctacgcattgccagttactccacagccttaccaactctgtgcagtggctcgctagcaggggcaggggctccattcttctccccggtttggtctgattgatgtccaataaacaacttctgtatcttc

SEQ ID NO: 503 - DNA, 3144 bp, Homo sapiens
ccgtgactgaagaagccattgccaagggtatcgcaggattgttgctgtcacaggtgctgtagactgaggttgaaggactaccccggagacggctgcagtcgttcggttcctgtctcttccgtgtaggatttgatttctcctaaacttggtttaagacttttaaagaaggccctaatttatcgaggcctgtttgtgaagtaaaattcggctggctactctcaacggaagaaagatgcaactgctaggccgggtgatctgtttcgtcgttgggatcctgctttctgggggcccaacggggaccatatcagctgtggaccctgaagcaaacatgaatgtgactgagataatcatgcactggggatatccagagcactcagtacagacaggagatggctacattctgggtgttcaccgaatcccgcatgggcggaagaaccagtttgataaaggtcccaaaccagttgtgtatcttcagtggcgacatggcttcctggcagattctagtaactgggtcacaaacattgacaacaacagcctgggcttcatcctggcagatgctggctttgatgtgtggatgggaaacagcagaggaaacacctggtctcggaagcacaagactctgtcagtttctcaggatgaatactgggccttcagttttgatgagatggcaaaatatgacctccctgcttcaattaactacattttgaataaaactggccaagaacagctgtataatgtgggccactctcaaggctgcaccataggttttatagcattttcacagatgcctgaactggcaaagaaggttaaaatgttttttgccctggctcctgtgttgtctctcaattttgcttcgggcccgatggtcaaattgggacggttgccggatctgcttcttgaggacttgtttgggcagaagcaatttcttcctcagagtgcaatggtgaaatggctaagcactcacatttgcacgcacgtcatcatgaaggagctttgcgccaacatcttctttctgatatgtggcttcaatgagaagaatttaaacatgtctagagtggatgtgtatacaacacactgtcctgcgggaacctctgtgcaaaacatggtacactggacccaggttgttaaataccataagcttcaagcttttgactggggaagcagtgacaagaattattttcattacaatcagagttatccacccttgtacagcataaaagacatgcaactacccactgctttatggagcgggggcaaggactggctggcagacaccagtgacatcaatatcttactgactgaaatccccacgttagtgtaccacaagaacattcccgagtgggaccatctggattttatctggggtttggatgccccctggaggctgtataatgaagtagtcagtctaatgaagaaataccagtgagtgccaagacttgagatgcttccccttcactaggggaaaaaaggacagatgtttgcttaattcctgcaaaatactgtgttttcctggtctagatcatttgtattttttatgtgcaagaaaacgatgatgttgaagacatacatgggtctggtcagtaagaagcacgctggctgtcttctgcttcattctgactgacaagccagagtcacaaccagtgatgcctttgaagtttttagaaagtatgggtgttacgtgaaagaagccattgcaacctcttgtttactttttacggtcgttttcggtgtctgcatgctgtgcatatacatgcctatgtgtgtgccctgtgctggccagagcctccttgtgtggaggtaatggctcacatcagggtatcttccctcagacactggtctctcgacgaaccagtcagtagcttgctattccagttagactggctgaccagggagcctccagaatctgtccgtctctaccttccctcaccaggtctacggagggtgatgtcccagccagcattttacactggttctagggacaggaactcaggttctcatgcttgatagcaagccctttcttcaccaaaccattgcctcaaaccctctgtgatcgaaaagctgctcaattacctttatgttcccacccaatgcaagtgaacgagcacaagacatttcaagctgttgtttgtgagctaaaaatcaatctgccagtgacttgaacatgctagggagaaactcctggccctgagcttgacaaacctgcagtccaggttctccagagattgagacagggaggctgctgttacatttagggttcatttggagagtgagactttgtctctacaaaaccaaagacaaaggagaagaagaaaaaaaaaaccctaaagtactcagttctcatctgttagcctcagagggcttagagagttcctgtgtttacctatccgaacaacattttcatgtctttatgcagtagctacctagtgaaatccagtgttatcccagcttctccaggcgtaaacattctctcttcaatctcatcagacctcagtagcaagcatttagtgaatatttagatttttcaggccaagccaagacaaaaatgaatagaataaaagaaaaaagagcccagactcttgaaagcggtttgcactgatttaaaaataaaaaaaaagaatcttgaagaatgacatgataaactgtgttggttccgcatgtgtagtcggatcccttttctgtggagaacgttctgtggagggacaaaccactaatttgccccaagtgaatgtggctgtagtgacagcgacagtgcctctgatcctgagaagcagggctggctgccggtgacaagcatcccagttcctttccccagagatgaagaggatgttttcagacagagctcggctcagggaatttcgcttggagaatcagtggtttatgtgcacaatgttttagtgagcctgctctgcgcctgatatggggaagccctcgactgttcaccgggctcgtgggcgacggctgccgtcagctggacagtggataagttttctgagtagtcaccacagattcagggatatcgctttgtgtcgactcctaaggaaggcaggacgatatgacttggtaacattgtaaaggttcacatttaaacttttcaataaatctcagcctcacaggcctgaacatcaaaaaaaaaaaaaaaaaaaa

SEQ ID NO: 504 - DNA, 3144 bp, Homo sapiens; identical to SEQ ID NO: 503

SEQ ID NO: 505 - DNA, 2335 bp, Homo sapiens
ctccagtggctgagtgatcaactatactcgatgtatcttccagggcttctgcagaagtgcaagatgtcttcatgacctacaccgtgtatgatgacatcatcaccattaagctcatccaagaagcctgcaaggttctggatgtgtccatggaagccattctgaagctctttggcgaatacttctttaagttctgtaagatgtctggctatgacaggatgctgcggacacttggaggaaatctcaccgagtttattgaaaacctagatgcactccacagttacctggcactgtcctatcaggaaatgaacgcaccatcctttcgagtggaggaaggagctgacggggcgatgcttctccactactactcagacagacatggtctgtgtcacattgtaccaggtatcattgaagctgtggccaaggacttctttgacactgatgtggccatgagtatcctggatatgaacgaagaggtggaaaggacagggaagaaagaacatgttgtgtttctggtcgtgcagaaggctcacagacagataagaggagcaaaggcaagccggccacaaggcagtgaggacagccaggcagaccaggaggctctccagggaacactccttcggatgaaggagagatatttaaacatccctgtttgccctggggagaaatctcactcaactgctgtgagggcatcggtcctttttggaaaagggcccctcagggacaccttccagcccgtctatcctgagagactatgggtcgaagaggaggtgttctgtgatgcttttcctttccacattgtctttgatgaagcactaagggtcaagcaagctggagtgaatattcagaagtatgtccctggaatcttaacccagaagtttgcactagatgagtatttttccatcatccaccctcaagttactttcaacatctccagcatctgcaagttcattaacagtcagtttgtcttgaagacaagaaaagaaatgatgcccaaagcaaggaagagccagccgatgctcaaactccggggtcagatgatctggatggagtctctgaggtgcatgatcttcatgtgttccccaaacgtccgcagcctgcaagagctggaagagagcaagatgcatctttctgatatcgctccgcacgacacgaccagggatctcatcctcctcaaccagcagaggctggcagagatggagctgtcctgccaactggaaaagaagaaggaggagttgcgtgtcctttccaatcacctggccatcgagaagaagaagacagagaccttgctgtatgccatgctgcctgaacatgtggccaaccaactcaaggagggcagaaaggtggctgcaggagaatttgaaacatgtacaatccttttcagcgatgttgtgacatttaccaacatctgtgcagcctgtgaacctatccaaatcgtgaacatgctgaattcaatgtactccaagtttgacaggttaaccagtgtccatgatgtctacaaagtagaaacaataggggatgcttacatggtggtgggtggagtaccagtacccgttgaaagccatgctcaaagagtcgccaattttgctctggggatgagaatttctgcaaaagaagtgatgaatcctgtcactggggaacctatccagatcagagtgggaatccacactggaccagtcttagcaggtgttgtgggagacaagatgcctcggtactgcttgtttggtgacactgtaaacacagcctctaggatggaaagtcacgggcttcccagcaaagtgcatctgagccccacagcccacagagccctgaaaaacaaagggtttgaaattgtcaggagaggcgagatcgaagtgaaggggaaaggaaagatgaccacatactttctgatccagaacctgaatgccaccgaggatgagataatggggcgaccttcagcccccgctgatgggaaggaagtatgtactcccggaaaccaagtcaggaagtcccctgctgtcccgaggaacacagaccatcagcaacaagtctacaaaggagacccagcagacgcttctaatgaagtcacacttgctgggagcccagtggcagggcgaaactccacagatgcagtcaataaccagccatcaccagatgagaccaagacaagtgtcgttgctagtggccctgtgctgtctgctttctgtgttgtgctgtgatcacgagaaaaagtgatcctatgggatccatttcctgtattccatggcagcaaagggaattaatttataaaaatgcttaagttcaaaatgtttttgtttccatatctcccttggggcccctttgagaataaaaaaattag

SEQ ID NO: 506 - DNA, 4835 bp, Homo sapiens
gagcagaggcgcaggacgtccgtctccgcgcgcgtgacttctgcctgcgctcaagcttcagagttcagtttcaaggagccgcccaaccatgaagacaccgtggaaggttcttctgggactgcttggtgtcgctgcgcttgtcaccatcatcaccgtgccagtggttctgctgaacaaagatgaagcggccgctgatagcgcgagaacttacacactagctgactatttaaagaatacctttcgggtcaagtcctactccttgcggtgggtttcagattctgaatacctctacaagcaagaaaacaatatcttgctattcaatgctgaacacgggaacagctccattttcttggagaacagtacctttgagatctttggagattctataagtgattattcagtgtcacccgacagactgttcgttctcttagaatacaattatgtgaagcaatggagacactcctacacggcttcatacagtatttatgacttgaataaaagacagctgatcacagaagagaagattccaaataatacacagtggatcacatggtcacaagaaggtcacaaattggcatatgtctggaagaatgatatttatgttaaaattgaaccacatttgcctagtcataggatcacatcaacaggaaaagaaaatgtaatatttaacggaataaatgactgggtttatgaagaggaaatcttcggtgcctactccgcactgtggtggtctccaaacggcacttttctagcttatgcccagtttaacgacaccggagtgcctctcattgaatactccttctactctgatgagtcactgcagtaccccaagacagtctggattccgtacccaaaggcaggagctgtgaatccaactgtaaagttctttattgtaaatacagactctctcagctcaactactactacgattcccatgcaaatcaccgctcctgcatctgtgacaacaggggatcactacttgtgtgacgtggcctgggtttcagaagacagaatctcgttgcagtggctcaggaggattcagaactattccgtgatggcgatctgcgactatgataagaccaccctagtatggaactgtccaacgacgcaggagcatattgaaacgagtgccacaggctggtgcggaagatttaggcctgcagaaccccacttcacctccgacggaagcagcttctataaaatcgtcagtgacaaagatggctacaaacacatctgccagttccagaaagataggaaacccgaacaggtctgtacatttattacaaaaggagcctgggaagtcattagtatcgaagctctgaccagcgattatctgtactacattagtaatgaatataaagaaatgccaggaggaagaaatctttataaaattcagcttactgaccacacaaataagaagtgccttagttgtgacctgaatccagaaagatgccagtattactcggtgtcacttagtaaagaggcaaagtactatcagctgggatgccggggccctggtctgcccctctacactctgcatcgcagcactgatcaaaaagagctgagagtcctggaggacaattctgctttggataaaatgctgcaagatgtccaaatgccttcaaaaaaattggacttcattgttctgaatgaaacaagattttggtatcaaatgatcttacctcctcattttgataaatccaagaaataccctctactaatagatgtatatgcaggtccctgtagtcaaaaagcagatgctgccttcagactcaactgggccacttaccttgcaagcacagaaaacatcatagtagctagctttgatggcagaggaagtggttaccaaggagataagatcatgcatgcaatcaacaaaagacttggaacactggaagttgaagatcaaattgaagcagccaggcaatttttaaaaatgggatttgtggacagcaagcgagttgcaatttggggctggtcatatggagggtacgtaacctcaatggtcctgggatcgggaagtggcgtgttcaagtgtggaatagccgtggcgcccgtgtcacggtgggagtactatgactcagtatacacagagcgttacatgggtctcccaactccagaggacaaccttgaccattacaggaactcaacagtcatgagcagagctgaaaattttaagcaagttgagtacctccttattcacggtacagcagatgataatgttcactttcagcagtcagctcagatctccaaagccctggtggatgctggcgtggatttccaagcaatgtggtacacggacgaagaccatgggatcgccagcagcacagctcaccagcacatctattcccacatgagccatttcctccagcagtgcttctccttacgctagcatggcaaggctctccgcagcttactcaagagcacacttgtcctcattatctcaaaactgcactgttaagatgacgattttaataatgtcgcctcgagaaattccagcctacttcccagttttatacctgcaatcctaactaaggatgcctgtcttcagaacagattattaccttacagcaatttggatttccccctctgttttgtttatcatttaaaaccatttccacatcagctgctgaaacaacaaatataaattatttttgcaagagctatgcatagatttcctgagcagaatttcaatttttttcccccttactaggctggtccaaatcttgttcccttatttaagggggtggcaagacgtgggtaatgatgtcattaggccagcaacaagagaagcgggaacagagaatatggctagaaacccaggtccaagcatacaaacccaaccaggctactgtcagctcgcctcgagaagagctgctcactgccagactggcaccgttttctgagaaagactattcaaacagtctcaggaaatcatatatgcaaagcactgacttctaagtaaaaccacagcagttgaatagactccaaagaaatgcaagggacgctgccagcaatgtaagggccccaggtgccagttatggctataggtgctacataaacacagcaagcctgatgggaaagcatgttaaatgtgcttttaaaaattaccaagtctcctagtgagaagaggcagcttggaacatagcgacttgccccgttaaaagttgaaaatatttgtgtcacaaattctaacatgaaggaatacttgcgtcagttcttcctacttcctttctttgagcattttcattaaagcattttaacttcattatctttctaatggaaaactgtatgagaatgttttgtgttattatttctattctacacactggaatgttgcctggtcatttagcaagtatgcttccattttttcaaaggtaatgggttatatcttgaatcaaacttaaactgcattgacatatggacacatttgttcaaaggttcttgtttaacttgtgtgaaatccaagactgtcttgtaaacatggaaagagttcaacttttaaaaaaaaatttagatacataaaactgtttaaagttatatgattcataagagtttatctaatacccccagaaatttctactcacatttatcacatagcttggtcatttacatactatggaactcataatattatttaacttaggggagcacgtgaggttcgtggcacgagatggaatgctatcagcagagtagacatgtttttccagggtcttgttttttgtttttgtttctggtctcttcctgtttgggcggagggtaatataatagataatatacataatagaatacactctgatacctgacttagccgtgttttgacaacttggaaacttgattcaattatttataacacagctgaaaatttaaaatggactccacacatttaaatgcagtttcaggccaattttctaggtacaattaccacagacaggtgagctacagcataaattccaaacatggcagaaatggaaattacctataaatataaatgagtttagatattgatgagcctgatgctatttcccgggcactccactgttcccctcaccttaaggaactctcaagtcctgctcttccactgcaagcacagctggtccttaaatctacaggcctctggctacagtccgaatttgaacacagttctgtcaccgtgtgcagcagcagcagccatgtgcaaagttctagatcaaggaacaaaggtagcacatgttcctgacagtgtggaaacataaacataaatgcgaattaaatagaaattatcccttctgaattctttttgttcctttcatttctaaataggttgttcctggagcctgaattaataaaaagaacacagcacacatttttcaggcgatgagggtttcacatggtgataatgtgaatacattcagtttttatttgattctcataggtcaagttttactgttcggtaagagttgtaaattagattaaaaccctgatgcataagttgtaaacaaacttaatttaagagcaagtttgaaaagcacaagagctaataacaccactgaggcatatagacaagtctcttatgggcatatgcagctccctgaagcgcatggatcaagctaccgcctcagagcacaccagcaccaggggcgcatgctaaaggaagagctcccctccccaccccccatgcttcacgatccatgttgacttcagtctgtgccattctgggcatcatagttctccttcagattattagcagttccacctcttggcacgtactacttttgctctaagttggagtgagagtactggtttataagattactggatttgtacaatatttaagattcaataaattctaagtg

SEQ ID NO: 507 - DNA, 2042 bp, Homo sapiens
gaacataaagtcagattgctaaacttctgtgtcgactgaaaaacatggtgaagcgagttgcaattgtgggagctggggtcagtggcctggcctccatcaagtgctgcctggaagaaggactagaacccacctgcttcgagagaagctgtgacttgggaggactttggagattcacggaacatgttgaagaaggaagagccagcctttacaactcagtggtttctaacagcagcaaggagatgtcttgttactccgatttcccttttccagaagactacccaaactttgtgccaaattctctgttcctggaatatctccagctgtatgcaacccagttcaaccttctgagatgcatctatttcaacaccaaagtgtgcagtataacaaaacgcccagatttcgctgtctctggacaatgggaagtggtcactgtctgtcaagggaagcaaagctcagacacctttgctgctgtcatggtctgcactgggtttctaactaacccacatctgcccctggattcctttccaggcatacaaacttttaaggggcagtacttccacagccggcagtataaacatccagacgtatttaaggacaagcgagtccttgtggttggaatgggaaattctggtacagacattgccgtggaggccagtcacttagcgaaaaaggtgtttctcagcaccaccggaggggcatgggtgatcagccgagtctttgattcagggtacccctgggacatgatattcatgacgcgatttcagaacatgctcagaaatcttctcccaactccagttgtgagttggttgatatcaaagaagatgaacagctggttcaaccacgtgaattacggtgtggctccagaagacaggactcagctgagagagcctgtgctgaatgatgagctcccaggccgcatcatcactgggaaagtgttgatcaagcccagcatcaaggaggtgaaagaaaactctgtcgtctttaacaatacaccgaaggaggagcctattgacgtcatcgtctttgccactggatactcctttgcgttccccttcctcgatgaatcaatagtgaaagttgaggatggccaggcatcactgtacaagtacatcttcccggcacatctgccaaaaccaactctggccgtgattggcctcatcaaacccctgggttccatgatacccacaggagagacacaagctcgatgggttgttcaggtcctgaaaggtgcgactacattaccacccccgagtgtcatgatgaaagaagtcaatgaacggaagaagaacaagcatagcggatttggcttgtgctactgcaaggctttgcaatccgattacataacgtacatagatgacctcctgacctcgatcaacgcaaaaccggacctgcgggccatgctcctgactgacccacgcctggctctgagcatcttcttcggcccatgcacaccttaccatttccgcctgactggtccaggaaagtgggaaggagccagaaaggccatcttgacccagtgggaccgaacagtgaacgtcaccaaaactcgaaccgtacaagaaaccccatctacctttgaaactttgcttaaactctttagttttctggctttgcttgtggctgttttctttattttcctgtaagtgaaagatctaactggctttccaaatgtgtggagtataaccttccaacttctctaatgtaacaatttcaccttcgtaattgtaaaccacgtccagagacacccaacccctacctctccccaactcacctcattggcaccttcattgctgggtctcttgctagtccatcaggtttagtgcaagaaaataatgtccagcaattctgttcacttaaaatgttggaaggatccaggccccctttcaggaagaatctgcccccagagaggactctgagcattctttcaatctaaaaaactgctttccctagatcttaatgaaaagcccaacttcgcggaatattggtctgcactaaaatagttctctgtgtattagttgactacaaataaaatggaagaaact

SEQ ID NO: 508 - DNA, 924 bp, Homo sapiens
cctggtggttccgcagccgtactctcctggcctggtgtgcacagcctcaccatgagttcttctgcagccagcccgcttttcgcgcctggcgaggactgcggccccgcgtggcgcgcggcccccgcggcctatgatacgtctgacacgcacctgcagatcctgggcaagccagtaatggagcgttgggagaccccctacatgcattcgctggcggctgctgctgcctccagagggggccgggtcctggaagtgggctttgggatggccattgcagcctccagggtgcagcaggcccccataaaggaacactggattattgaatgcaacgatggggtcttccagcgtctacaaaactgggccctgaagcagccacataaggttgttcccttgaaaggcctgtgggaggaggaggcacctacactgcctgatggtcactttgatgggattctatacgacacatatccactgtctgaagagacctggcacactcaccagttcaactttattaagactcatgctttccgtttgctgaagcctgggggtatcctcacttactgcaacctcacgtcctggggggaactcatgaagtccaagtacacagacatcactgccatgtttgaggagactcaggtgcctgcactgctggaagctggcttccagagagaaaacatctgtacagaggtgatggcgctggtgcccccagccgactgccgctactatgccttccctcagatgatcacacccctggtcaccaagcactgagcggctggcccagggctacaaggagaatatgtcctcctcagtgcctttgtagctggagtgtggctccagcctctccactatccctgcagtgtgacatcctaacctctgcctggtacggccatctccccagagctcaggagtaaaataaatgctaccaagact

SEQ ID NO: 509 - DNA, 1258 bp, Homo sapiens
gggggaacgcgtcagacttggccaactgaggctgggctggacccctattgtggaatcgcggacacttcctacagttgtcgaacgcaatccgtctacaccaccttgtgtcactacctaccaccatgggtttggagctctacctggacctgctgtcgcagcccagccgcgcggtctacatcttcgccaagaagaatggcattccctttcagttgcgtaccgtggatttactcaaagggcagcacttgagcgagcaattctcccaggtgaactgcttaaagaaagtgcctgtcctcaaagacggaagcttcgtgttgaccgaaagcactgccatcttgatttacctgagttccaagtaccaggtggcagaccactggtacccggccgacctacaggcccgtgcccaagtccacgaatacctgggttggcatgccgacaacatccgtggcacctttggagtactcctgtggaccaaggtgttggggccactcattggggtccaggttcccgaggaaaaggtggaacggaacagaaatagtatggtcttggctctgcaacgtctggaggacaagttcctcagggacagggccttcattgctggccagcaggtgacgctagcggatctcatgtctctagaggagttgatacagccggtggctcttggctgtaatctgtttgaggggcggcctcaactgacagcgtggcgagagagggtggaggcgttcttgggtgctgagctatgtcaggaggcgcacaaccccatcatgagcgtcctgggacaggcagccaagaaaacattaccagtaccccctccggaggcccatgccagcatgatgcttcgaattgccaggattccctgagtggttttttttccctgagtatttttattgctataaagactcattttgtattttgcctctttgttttgttttgtttttgtttcttcttgtcccaacctttttttttttttttttttttctggctccttttctggctctgggaggagctttgctcaaaagggacaccacctatccttagcatgcttctcttgaggtacagtatgcacaaccaataggagacccaagtcaataatatataaaaggtgcttaaaaaaaaaaaagcaaacagtaacacacacgaagaaatcaaccaaaaattggtggacatctgttttttattataatatagattctgaatattttaaggaataaagagttattgttttattacattgccctctaatctgtatggaataaattat

SEQ ID NO: 510 - DNA, 1258 bp, Homo sapiens; identical to SEQ ID NO: 509

SEQ ID NO: 511 - DNA, 1124 bp, Homo sapiens
cggcacgagctaacaccctgttctcagactcctccgcgcctctccgcctgtcctcaggatcatgaaggtcgccagtagcagtgccgcggccaccgcaggccccagctgttcgctgaaggcaggcaggacggcgggcgaagtggtgcttggtctgtcggagcaaagcgttgccatctcgcgctgcgctgggacgcgcctgcccgccttgctggacgaacagcaggtgaacgttctgctctacgacatgaacggctgctactcacgcctcaaggagctggtgcctaccctgcctcagaaccgcaaagtgagcaaggtggagatactgcagcatgttatcgactacatcagggacctgcagctggagctgaactctgagtctgaagtcgcgaccgccggaggccgggggctgcccgtccgggccccgctcagcaccctgaacggcgagatcagtgccttggcggccgaggtgaggtccgagtcagagtattacattattctcctgtgggaaactaaggccacgggaggggggtgtcccccttacttctcaggagcatagttatttaggggcgaccaataggaaaaagctcgcgctttcatcgtgcctcctggagtagagaagtgggaatgcctctcccctccagttctttccagtgggtctcatgccttatctcgctctggtgttcacaggcggcatgtgttccagccgacgaccgcatcttgtgtcgctgaggcggcgcactgaggaaccagatggactccagcccttcaggaggcaagaggaaaaaaagtgctctcggttccccagagcaacccggggaaagacactaccgcggccacgggactcttgacggatctgtccagggggtagagggttgatcaacggagtctcgccctctccacctttcagcctccagagactttgaggagggggttattcaaccccgtgtgtttctgtttttttgaaaaagcagacattttttttaaatggtcacatttcgtgcttctcagatttctgagaaaatgttttgtattgtatattacaatgatcactggctgagaatattgttttacaatagttcttatgggggtgggttttttgttgttattaaacaaacactttagat

SEQ ID NO: 512 - DNA, 1543 bp, Homo sapiens
cgaaattgcagtttctccttggcccacccctgtgtcagcagctccaggatgtggcagttcagaatcttcctgctgttcgcgtccacctgggggatttctggcgtatcagcccatcccgacccagtgttctccagcagcgagggtgcccaccaggtgcttcgggtcagacgagccaacagcttcctggaggaggtgcgggcaggcagcctggagcgggagtgtatggaggagatctgtgacttcgaggaggcccaggagattttccagaatgtggaagacacactggccttttggatcaagtacttcgatggtgaccagtgctcaactccgcccttggaccaccaatgcgacagcccatgctgcggccatggcacatgcatcgacggcctgggcggcttcagctgcagctgcgataagggctgggagggcaggttctgtcagcaggagatgggcttccaggactgtcgggtgaaaaatggcggctgctaccactactgcctggaggagaccagagggcggcgctgccgttgcgccccgggctatgagctggcagatgaccacatgcactgcaggcccaccgtgaattttccgtgtgggaaactgtggaagcggactgacaagaaacgcaagaacttcaaacgggacatagacccagaagacgaagaactagaactaggtccaaggatagtcaatggaacactaacaaagcagggtgacagtccctggcaggcgatccttctggactccaagaagaagctagcctgtggaggggtgctcatccacacctcctgggtgctgacggcagcccactgtctggagagcagcaagaagcttaccgtgaggcttggtgagtatgatctgagacgcagggacccctgggagttggacctggacatcaaggaggtcctcgtccaccctaactacacccggagcaacagcgacaacgacatcgccctgctccgcctgtcccagccagccacactctctaaaaccatagtgcccatctgtctgccgaacagcggcctggcgcaggagctcagtcaggctggccaggagacggtggtgacaggctggggctatcaaagcgacaaagtcaaggatggcagaaggaaccgcacctttattctcaccttcatccgcatccctttggccgctcgaaatgactgcatgcaggtcatgaacaacgtggtctcggagaacatgctctgcgccggcatcattggagacacgagagacgcctgcgacggcgacagtgggggacctatggtggtcttctttcggggtacctggtttctggtgggcctggtgagctggggtgagggctgtgggcacctcaacaactatggcgtctacaccaaagtgggtagctacctcaaatggatccacagctacataggggaaagggatgtttccctgaagagcccgaagctgtagcatccctccctgctcatctctggggcccagaggtcactcttagaataaggctgggctagtgagtaccaagacaggggacattaaaggggcaagcaacacctgaaaaaaa

SEQ ID NO: 513 - DNA, 3079 bp, Homo sapiens
cgcccgccgcgcggcccgagggcgcccccagagcggagctgcggccaggaggaggacgcggccatggggctgctgtcccaaggctcgccactgagctgggaagagacccagcgccacgccgaccacgtgcggagacacggcatcctccagttcctgcacatctaccacgcagtcaaggaccggcacaaggacgtgctcaagtggggtgacgaggtggagtacatgttggtgtcctttgatcatgaaaataggaaagtccagttgttactgaatggcggcgatgttcttgaaactctgcaagagaagggggagaggacaaaccccaaccacccaaccctctggagaccagagtatgggagttacatgattgaagggacacctggccagccgtacggaggaacgatgtccgagttcaacacagtggaggacaacatgaggaaacgccggaaggaggctacttctgtattaggagaacatcaggctctttgcacgataacttcatttcccaggctaggctgccctggattcacactgccagagcacagacccaacccagaggaaggaggtgcatctaagtccctcttctttccagacgaagccataaacaagcacccccgctttggtactctaacaagaaacatccggcatcggagaggagaaaaggttgtcatcaatgtgccaatattcaaggacaagaacacaccatctccgtttgtagaaacatttcctgaggatgaggaggcatcaaaggcctctaagccagaccacatctacatggatgccatgggatttgggatgggcaactgctgtcttcaggtgacattccaagcctgcagtatatctgaggcaagatacctttatgaccagttggccactatctgcccaattgttatggctttgagtgctgcatcgccattttaccgaggctacgtgtcagacattgattgtcgctggggagtgatttctgcatctgtagatgatagaacacgggaggagagaggactggagcccctgaagaacaatcgctttaaaatcagtaagtctcggtatgactcaatagatagctacctgtccaagtgtggagagaagtacaatgacatcgacctgaccatcgacacggagatctacgagcagctcttagaggaaggcatcgatcaccttctggcacagcacgttgctcatctctttattagagacccactgaccctttttgaagagaaaattcatctggatgatgccaacgagtctgaccattttgagaatattcagtccacaaactggcagacaatgaggtttaagcctcctcctccaaactcagatattggatggagagtagagttccgaccaatggaggtacagttgacagactttgagaactctgcctatgtggtatttgtggtactgctgaccagggtgatcctctcatacaaactagacttcctcattccactgtccaaggttgacgagaacatgaaagtggcacaggagcgagatgccgtcttacaggggatgttttatttcaggaaagacatttgcaaaggtggcaacgccgtggtggatgggtgtagcaaggcccagaccagctccgagccatctgcagaggagtacacgctcatgagcatagacaccatcatcaatgggaaggaaggcgtgtttcctggactcatccccattctgaactcctaccttgaaaacatggaagtcgacgtggacacccgatgcagtattctgaactacctgaagctaattaagaagagagcatctggagaactaatgactgttgccaggtggatgagagagtttattgcaaaccatcctgactacaagcaagacagtgtaataactgatgagatcaactatagcctcattttgaaatgcaatcaaattgcaaatgaattgtgtgaatgtccagagttacttggatcaggctttagaaaagcgaagtacagtggaggtaaaagcgacccttcagactagacatccagcaaagtggatggcagctgcagccctgaccccgagcccactcagacgctgtgaagaccaagatggcctacagtgttccagttgcccacaagtgactagaagcttccttcagtaggtgaatctgagtttgtatatgtatatactaaagtatttttatgattattaacaatgtattttaataacactgtatctacagtcatggtgaactggcttgtacatttttgaattctgactctggagcgactgctgtctaggcagttttgtaaatgtaattgtacaatacatgtacctgcattccagagtttcaatgtttactgtaaaccttctttaatactacctgggacctgattcactgaaatttatttttaaaaaaatgctttctcctacctgtttcttgagtctcctcttgctgtgtacgtgaagtcactggactgcactgatgccctctgagggcgaggcaccttacctgtgacacttcctttgcagagcagtcccactcctgccacggaactgaactctgccagctattagaaaagaaactacaaatcctagattcgtctgaatatacagactcagagaatatttagtttcatctgaaaaggaaaaccttttccttctatgtacaccaagagctctgtcaaatgtctgctctccattaccacctgtctgacctctgctgagaacagtcgtcagtgcagccaccaggtttccgccctctctcaagtttgctgtagcagattggcagactgtcttctaacagccattcatttcattccagattttcccaggggaatagtctgcatcctgcttgctttctgtataaaacttacaaatcaatcatgaaatgcactaatttttgtgaatcaggaccctaagtgtttaattgtaaataatttgtttcatagattgctttaggtttgtgttatctttttaattgttaactgaatttaactacttctaaagtaactgaactgtagattaagccaagctttacagataaaaatatttactgtaatgctaattttgaaagattgcaataaagccacttcagcttaaagctttaaaaaaaaaaaaaaaaaaaaaaaaaaaaaaaaaa

SEQ ID NO: 514 - DNA, 1504 bp, Homo sapiens
gctgcgtggcgtcagggttctggagctggcaggcctggccccagggccgttctgcgggatgatcctggcggacttcggcgccgaggtggtgctcgtggacagactgggctccgtgaaccaccccagtcacctggcccgaggcaagcgctcgctggcgctggacctgaagcggtctccgggagccgcggtgttgcggcgcatgtgcgcacgcgcggacgtgttgctggagcccttccgttgcggtgtcatggagaaactccagcttgggccagagactctacggcaggacaatccaaagctcatctatgccaggctgagtggatttggccagtcgggaattttctccaaagtagctggccatgacatcaactatgtggctttgtcaggtgtcctgtcaaagattggcaggagcggtgagaacccataccctcccctgaacctcctggccgactttggtggcggtggcctcatgtgcacattgggcattttgctggctctcttcgaacgcacgcggtctggcctagggcaggtcattgatgcgaacatggtggaaggaacggcatacttaagtactttcctgtggaaaactcaggccatgggtctgtgggcacagcctcgagggcaaaacctgttagatggcggggcacctttctacacaacctacaagaccgcagatggggagttcatggctgtaggtgcaatagaaccccagttctacacactgctgcttaaaggacttggacttgagtctgaggaactccccagccagatgagcatagaagattggccagaaatgaagaagaaatttgcagatgtgtttgcaaggaagactaaggcagagtggtgccagatctttgacgggacagatgcatgtgtgaccccagtgctgactcttgaggaggccctccaccaccagcacaacagagaacggggctccttcatcactgatgaggagcagcatgcatgcccccgtcctgcaccccagctttccagaacccctgctgttccttctgccaaaagggacccttctgtgggagagcacactgtagaggtgcttaaagactatggattcagtcaggaagagatccatcagctgcactcggatagaatcattgaaagtaataagctaaaagccaacctctgactcaggttcacagctcaagtgaatctgaaggctgtatctgtactggagaaggatgcccaccactgtccgtatggaaatgtgaatgaacagtaatgaagtaatccaaatattccaatcaagacacaacgaaagactgattacagagaaatgactgtgctctcacactgctcatccgagcctctgattgaggagtatttttgtgtgtgtactgatattaacttgtggcagttttctgcctttcagcttacttggtgaagtgcattcactgattaaaacccttttgtaaatgcaactctgataatatattaaatgaactaatataactttaataaataaagcttttttttccttgaaaaaaaa

SEQ ID NO: 515 - DNA, 1250 bp, Homo sapiens
ctcacactacagtagcaatggtgcctgtcctgttgtccctgcctctccttctgggtcctgcagtccttcaggagactgggtcttattctctgatcttcctctacaccgggttgtccaggcccagcaaaggccttccgaggtttcaagccaccgcatttctcaacgatcaggccttcttccactacaacagcaacagtgggaaggcagagcccgtggaaccctggagccatgtggaaggaatggaggactgggagaaggaaagccagcttcagagagccagggaggagatcttcctcgtgaccctgaaagacatcatggactattacgaggacagtacagggtctcacacctttcagggaatgtttggttgtgagatcacaaataacagaagcagtggagcagtctggaggtatgcctacgatggagaagatttcatcgaattcaacaaggaaatcccagcctggatccccttagacccagcagccgcaaacaccaagctgaagtgggaggcagaaaaggtctatgtgcagcgagccaaggcatacctagaggaggagtgtcctacaatgctgaagaagtacctgacctacagtagatctcacctggaccgaacagatcctcccactgtgaaaatcaccagccgtgtggccccaggaagaaacagaatattcagatgtctggcctatgacttctacccacaaagaattagtctgcactggaaccaggccagcaagaagctggcatctgaaccagaaagaggtgtttttcccaatggaaatggcacttacctctcctggatggaggtggaagtccccccacagaacagagacccctttgtctgccacatagaacacaaggggctatcccaatctctctcagtgcagtgggatgagaaaagtaaagtctgaaaacagtgctgtatctcagcctcagaaaggttaccctctctgccggatatgagagagttgaacttcagaagtcactgtcaccagcaagccagcaagtctccaaggaatgggtgtgggcccagaagatttgaataccaagcaccaagttcactctcaaagtcaaatcaatcaccttgccttgtaaaactcctcctcaattaatctgtaagcccttgcaattaccttcacgcccagcacagcacagaaaggcactttaaactctgagatgctacagaagtgtgagttgattttatcatgtatactgccccgacatacttgattcatgggaatgtctccatattc

SEQ ID NO: 516 - DNA, 4377 bp, Homo sapiens
tgcggagccgctggagcggagcggtgttagcggcgttgctggaagatggcgagcggctgggatgagcggccgccctggcggctggaaagcctgcggctgctaccgccgccaccgctgctgctgctactgctgctattgaggagctcggcccaggcggcgcacatcaagaaggctgaggcgaccacgacgaccgtcggcggctccgaggcggccgagggccagtttgaccactactaccacgaagcggcgctgggcgaggcactggaggcggcagcggccgcggggccgcctggcctggcccgtctcttcagcatcggcaattcggtggagggccgaccgctgtgggtgctgcgcctcacggctggcctggggccgccgcccacccccgccgccgtggggctggacgccgcggggccgctgctgcccggccgaccgcaggtgaagctggtgggtaacatgcacggcgacgagacggtgtcgcgccaggtgttggtctacctggcccgtgagctggcgtcgggctaccgccgcggggacccgcgcctggtccgcctgctcaacaccaccgacgtatatttgctgcccagcctgaatccggatggcttcgaacgcgctcgcgagggtgactgcggcctcggcgacagcggtccgcctgggaccagcggccgagacaacagccgaggccgcgacctcaaccgcagcttccctgaccagttcagcacgggggagccaccttccctggatgaggtgccagaggtgcgcgccctcatcgactggatccgcaggaacaagtttgtgctttctggaaatcttcatggtggctcagtggtagcaagctatccttttgatgattctcccgagcataagaccactggaatctatagcaaaacctccgatgatgaagtctttcgatacttggcgaaagcttatgcttctaaccaccctataatgagaactggtgaaccccattgtccaggagatgaagaggagactttcaaagacgggatcacgaacggtgcgcactggtatgatgtggaaggtggtatgcaagattacaactatgtgtgggccaactgttttgagatcacattagaattatcttgctgcaaatacccacctgcttctcagcttcgacaagaatgggagaacaaccgtgagtctttgatcacattgattgaaaaggtccacattggaattaaaggatttgttaaagactcagtcacaggctctgggttggagaatgcaaccatctcagtggctggtattaatcataatatcacaactgggagattcggtgatttccacagactgctcattcctggaagttacaatcttacagcggtttcacctgggtatatgccgttgactattaataatatagtggtgaaagaaggaccagccacagagatagatttctcccttcaaccaactgtgatgtcagtagtgcctgactcgactgaggctgtgacaactcccggcacagttgccgttcctaatattcctcctggaacaccatcgtcccatcagccaattcagcctaaagactttcaccaccaccattttcctgacatggaaatcttcttgagaagatttgccaatgaatatcctaacatcactcgcctttattctctgggaaagtccgtagagtcgagagaactgtatgtgatggagatatctgacaacccaggcgtccatgaaccaggtgaaccagaatttaaatatattggaaatatgcatggaaatgaagtggttggaagagaactgctattgaatctcatcgaatacctctgcaagaactttggaacagaccctgaagtaacagatttggttcgcagcactagaattcacctcatgccatccatgaatcctgatgggtatgagaagtcccaagaaggagactcgataagtgtagttggcagaaacaacagcaacaactttgacctaaaccgaaatttcccagaccagtttgttccgatcacagatcctacccaacctgaaactatcgctgtgatgagctgggtgaaggcctatccgtttgtgctgtcggccaatctgcatggaggttccttggtggttaactacccttatgatgataatgaacaaggagttgccacatacagcaaatcaccagatgacgccgtgtttcaacaaatagcactttcttattccaaggaaaactcgcagatgttccaaggtagaccttgcaaagacatgtaccttaatgagtattttcctcatggcataacgaatggagcgagttggtataatgtcccaggtggtatgcaggactggaactatttacagacgaattgctttgaagtaaccatcgaactaggttgtgtgaaatatccattcgagaaggaactgccaaagtactgggagcaaaaccggagatctctaatccagtttatgaaacaggttcatcagggtgtcaaaggatttgttcttgatgccacagatggtaggggcatattaaatgccaccctcagtgttgctgaaattaatcacccagtgacgacttacaaagctggagattactggcgtctcttggtcccagggacatataaaatcacagcatctgctcgagggtataaccccgtcaccaagaacgtgaccgtcaggagtgaaggtgctattcaggtcaacttcacacttgttcgatcttcaacagatgcaaacaatgagtcaaagaaaggaaaggggcatagcaccagcactgatgacaccagcgacccaacttctaaggagtttgaagcactgatcaaacacctttcggctgagaatggcttggaaggcttcatgttaagctcgtcctcagacctggctctgtatcgataccattcctacaaagacttatccgagttcctgagaggactcgtaatgaactacccacacattacaaaccttaccactttgggacagagtgttgaatatcgtcacatttggtcccttgaaatctccaataagcccaacatatcagaacctgaagaaccgaagattcgttttgttgctggtatccatggaaacgctccagttggcactgaactgcttttggctctggcagaatttctttgcctgaattacaaaaagaatccagttgttacccaattggttgacaggactagaattgtgattgtcccctctctgaatccagatgggagagagcgagcacaggagaaagactgtacctcgaagactgggcacacaaatgcccgtggcagggacctggacacagacttcacaagtaatgcttcccaacctgagaccaaagccatcattgaaaacttgattcaaaaacaggatttcagcctttccattgctttagatggtggttctgtgctggtcacatatccgtacgacaagccagtccagacagtggaaaacaaagaaacgttaaagcatctggcgtctctttatgcaaataaccacccatcaatgcacatgggtcagcccagttgcccaaataattcagatgagaacataccaggaggagtgatgcggggagcagagtggcacagtcacctgggcagcatgaaggattatagtgtcacctatggccattgcccagaaatcacagtatacacaagctgctgctacttcccaagtgcagctcaactccctgccctatgggcagagaacaagaagtctctcctcagcatgctggtggaggtccacaaaggagtccatgggttagtaaaagacaagactggtaaaccaatctctaaagcagtaattgtactcaatgaaggaataagagtacacacaaaagaggggggttatttccatgtgcttttagctcctggggtccataacatcaatgccatcgctgatggatatcagcaacagcattcacaggtctttgtgcatcatgatgcagccagttctgtggtgatagtctttgatacagataaccggatatttggtttgccaagggaacttgtggtaactgtgtcaggtgccaccatgtcagcgctgatcctcacggcttgcatcatttggtgcatctgctctatcaagtctaacagacacaaagatggcttccaccggctgcggcagcatcatgatgaatatgaagatgaaattcgcatgatgtcaactggctctaagaagtcccttttaagccatgagttccaggatgaaacggacacagaggaagagacattatattctagcaaacattgagaagcacggtttgcatatctccctgcttaagtaccaggcaaatgacagctcctcttgggagacactgcagtaagaagagagattccttcctccttcaaagagctttgggaagttagcctgctaaattcatactctctgaatgtcacaggcagttttgaacttcccttccttaaaagtactcttaaccttttcctt

SEQ ID NO: 517 - DNA, 1242 bp, Homo sapiens
atgtggctggaacttgtcctggcttcccttctgggctttgtcatctactggtttgtctcccgggacaaggaggaaaccttaccactaggagatggatggtgggggccagggtcaaagccatcagccaaagaagatgagagcatccggcccttcaaggtggaaacatcagatgaggagatcaaggacttacaccagaggatagataggttccgggcatccccacctttggagggcagccgcttccactatggcttcaactccaactacatgaagaaagtggtgtcctactggaggaacgagtttgactggaggaagcaggtggagatcctcaaccagtaccctcacttcaagaccaagatcgaagggcttgacatccacttcatccatgtgaagcctccccagctgccctcagggcgcaccccaaagcccttgctgatggtgcatggctggcctggatccttctatgagttttacaagatcatcccactactgactgaccccaagtcccacggtctgagtgacgagcacgtgtttgaagtcatctgtccctcgattcctggctatggctactcagaggcatccagcaagaaaggtttaaattcggtggccactgcgaggattttctacaagctgatgacacggctgggcttccagaaattctacattcaaggcggggactgggggtccctcatctgcaccaacatggcccagatggttcccaaccacgtgaaaggcctgcacttaaatatggctttcatttcgagaagtttttacaccatgactcctctcctgggccaacgcttcgggagattccttggctacacagagaaggatatcgagctcttgtacccctataaggagaaggttttctacagcatcatgagggagagtggctacttacacatccaagccaccaagccagacactgtgggctgtgctctcaatgactctcccgtgggcctggctgcctacatcttagagaagttctccacctggaccaagtcagagtaccgtgaactggaggatggaggcctggagaggatgaaggtctttgtgcccactggcttttcagccttcccttccgagctactgcatgccccagaaaagtgggtgaaggtcaagtaccccaaactcatctcctattcctacatggaacgtgggggccactttgctgcctttgaagagcccaagcttctggcccaggacatccgcaagttcgtgtccctggctgagctgcagtag

SEQ ID NO: 518 - DNA, 1680 bp, Homo sapiens
gcgggccgcggagggggcggggctccaccaccacctcagctgcggacggaggcgagatggcggccactgagggggtcggggaatctgcgccaggcggtgagccgggacagccagagcagccgccgcccccgcctcctccgccgccagcacagcagccgcaggaagaagagatggcggccgaggccggggaagcagcggcgtcccctatggacgacgggtttctgagcctggactcgcccacctatgtcttgtacagggacagggcagagtgggctgacatagacccagtgccccagaatgatggccccagtccagtggtccagatcatctacagtgaaaagtttagagacgtctatgattacttccgagctgttctgcagcgcgatgaaagaagcgaacgagcctttaagctcactcgagatgctattgagttaaacgcagccaactatacggtgtggcattttcggagagttctcttgaggtcgcttcagaaggatctgcaagaagaaatgaactacatcatcgcaataattgaggaacagcccaaaaactatcaagtttggcaccataggagagtattagtggagtggctgaaagatccttctcaagagctcgagttcatcgccgatatccttaatcaggatgcaaagaattaccatgcctggcagcatcgacagtgggtcattcaggagtttcgactttgggataatgagctgcagtatgtggaccagcttctcaaagaggatgtgagaaataactctgtgtggaaccaaagacacttcgtcatttctaataccactggctacagtgatcgcgctgtgttggagagagaagtccaatatactctggaaatgatcaaattagtgccacacaatgagagtgcgtggaactacttgaaagggattttgcaggaccgtggtctttccagataccctaatctattaaaccagttgcttgatttacaaccaagtcacagctccccctacctaattgcctttcttgtggatatctatgaagacatgctggaaaaccagtgtgacaacaaggaggacattcttaataaagcactagagttatgtgagattctagctaaagaaaaggacactataagaaaggaatattggagatatattggacggtccctccagagtaaacacagcagagaaagtgacataccggcgagtgtatagcagcaagagcggctggaagaagtggacaatgctttctaaggcctcttattcgggagtgtagagcggttagagcggtcatctcatgcctgtgagctaacgttgtccaggtgctgtttctaacaagaactaaggatgactcctgtgtctgacgctgttcagactagctaagagtcgatttcctaaagcaaggtcattggaggggagggtgaagaaaactttcccgtaaaggaactactgcttttgtagtcttcccaacatttaatccaatcctgtagaatcagcatctcctgaaagacatggtgcacggctgtgtgctgggcgtggctaagggcagctgtgtcatgggtttgcagtcatgggaacctcggagcgctgcccgggactgcattgatgattagggctgctggcctcacccacaggatcttgctatcactgtaaccaactaatgccaaaagaaaggttttataataaaatcacattatctacaaac

SEQ ID NO: 519 - DNA, 2573 bp, Homo sapiens
actccgcttgctcctcctcctacaatgtataaccaggcagagctgaggacagctactcatccacattcggaacaggacctggattgagacaacaactccgcacacaacatgtcagaagacaagatcaccggaaccttggctttcactgtcttcactgcagtgctgggttccttccagttcggatatgacatcggtgtgatcaatgcacctcaagaggtaataatatcccattatcgacatgttttgggtgttcctctggatgaccgaagagctaccattaactatgacatcaatggcacagacaccccactcatagtcacaccagcacatacgacaccagacgcctgggaagaagagactgaaggatctgctcacatagtcactatgctctggtctctgtctgtgtccagctttgcagtaggcggaatggtcgcctcgttctttggtgggtggcttggggacaaactcggaaggatcaaagccatgttggctgcaaacagcctctcgttgactggagccctcttgatggggtgttccaaatttggaccggcacatgctctcatcattgctggaagaagcgtatcaggactgtactgtgggctaatttcaggactggttccaatgtacattggcgagattgctccaaccacactcaggggtgccctgggcactcttcaccaactggctcttgtcacaggcattcttattagtcagattgctggcctcagcttcattctgggcaatcaggattactggcacatcctacttggcctatctgctgtaccagctctcttgcagtgtctgctactgctcttctgtccagaaagccccagatacctttacctaaatttggaagaggaagtcagggcaaagaaaagcttgaaaagactaaggggcactgaggacatcaccaaagatattaatgagatgaggaaagaaaaggaagaggcgtcgactgagcagaaggtctccgtgatccagctcttcacggatccgaattatcggcagcccattgtggtggcactgatgctacacttggctcagcagttctctggaatcaatgggatattttactattcaaccagcatttttcagacagctggcatcagccagcctgtgtatgcaaccatcggcgttggtgccatcaacatgatcttcacagctgtctctgtgctgcttgtggagaaggcggggcggcggaccctgttcctggccgggatgattggcatgtttttctgtgccgtcttcatgtcgctgggactggtgttgctggataagttcacctggatgagttatgtgagcatgacggccatcttcctcttcgtcagtttctttgagattgggccaggtccaatcccttggttcatggttgctgaatttttcagccaaggaccccgtcccacggctctggcactggctgcctttagcaactgggtctgcaatttcatcatcgccctctgcttccagtacattgcggacttcctcgggccttacgtgttcttcctttttgctggggtggtcctggtcttcaccctgttcacattttttaaagttccagaaaccaaaggaaagtcttttgacgaaattgctgcagaattccggaagaagagtggttcggccccaccacgcaaagccactgtacaaatggaattcctggggtcatcagagactgtgtgaggatgagctgcctaaaatccaggaacagaccagaagggaaccaggtgctccctcttaactcgaatccttcatgagtgtaggactacacccaggaggatcatttattccttttgaagaatttgtacagactccgattagaaacgtcaacatatatcattaccaaagaaagtatttttttaacttagagaatctattttggatggtaaaactcttcagtaaaccagaggctgctctgcttctctacagggaaagcacgttataagcttcctcgcctggttctactgaaattggagagctttcaacatatcactgctcttaaaagcacgtgactaagaaatctgaagctacaactgatatatatatatttaaatataattccattggaattttcttagccacagatctgatgctgaaggacctatggctggcaaggctcacactcaaactgacgtctctgttacccacctcggtttctctcacatgtactagactttgtgttttgttttaaactatttttctgcatttttatagagaactcctgagtatgttaagctatatttgtaatgaaaagcctcttctttacagctaccaaaatcttcatgtagtgagagaaaacgtttcagtttctttgatgtatattgtaaggttaaacgctcgagtttttcctagccattgagtctagattatcagttaatattagcatctaaaccatgttagttactctccatttcagtcctttgtattgtacttttacttgtttttttttttaattgcccatggcacacacttaaaaccatcaggagtcaggcattttgcatattgcctccaaaatctaataaactggaccaatcacagggaaatctggaataaagagctgctctatttgttcatttttt

SEQ ID NO: 520 - DNA, 1490 bp, Homo sapiens
tctagctctccaagctgattatctgggctgcccctgacatttgtccatctcccagggcctctctggagcagccatgaagtccctggtcctgctcctttgttttgctcagctctggagctgccaatcagctccacaaggtgcagggctgggttttcgagaattggcttgtgatgacccggaaacagagcatgtagctttgatagccgtgcactacctcaataaacatcttcttcagggattcaggcagatcttgaatcagattgacaaagtcaaggtgtggtctcggcggcccttcggacaggtgtatgagttggaaattgacacgctggagacaacctgccacgctctggacccaacccccttagcaaattgttctgtgaggcaacaggccgagcatgcggtggagggagactgtgacttccacatcctgaaacaagatggccagttcagggtgctacacgcccagtgtcattccacaccagactctgcagaggacgttcggaagttttgcccacgatgcccaatcctgatccggttcaatgacaccaacgtggtccacactgtcaaaactgccctggctgccttcaatgcacagaataatggaacctattttaaactggtggagatttcccgagctcaaaatgtgcctttcccggtgtctactctcgtggagtttgtgatagctgcgactgactgtactggtcaggaggtcacagatccagccaaatgcaacctgctggcagaaaagcaatatggcttctgcaaggcgactctcatccacagacttggtggggaagaggtttcagtggcctgcaagttattccagacacagccccagccagccaatgccaaccctgcaggtcctgcacccacagtgggccaagctgcgcctgtagccccaccagctggcccacctgaatccgtggtggtaggacccgtggcagttcctctaggacttccagaccaccgaacccaccatgacctacggcatgccttctctcctgtggcttctgtggagtcggcctcaggagaagttcttcactcacctaaggtgggccagcctggtgacgctggtgctgctggcccagtggcccccctgtgcccagggagagtcagatacttcaagatctaggcttgactcagggaagtaaggttttggcaggcaggacatagccaccactgaagtagagggcttgtccactgaccaagcaagtaccacatcatagcttgaattcaggtctcttcattccccagagaaaaggggcagagaggtgatggttaaatttgttgaaagccagcagcagcaacactagcacttgtggggtgacagactactgtcatttgtttctttgccttctcactgacctcatacaaagcagttgcaagcgcgactgtgaaaggtgctctcaccaaacttcaatctacccataaataaaagtacccgaaggagctttcttaaacaagaaggttctgagccgagtgtggttgtg

SEQ ID NO: 521 - DNA, 2484 bp, Homo sapiens
gggatcaaagcttagtgtcctgaggtgcggagcttggaacgcgaagaaaagtgaccatggacaacaacgaaacctccgtggattcaaaatccattaataattttgaaacaaagactatccatggaagcaagtcgatggactctggaatatatctggacagcagttacaaaatggattaccctgaaatgggcttgtgtataataattaataataagaacttccataaaagcactggaatgtcagctcgcaatggtaccgatgtcgatgcagctaacctcagagagacattcatggccctgaaatacgaagtcaggaataaaaatgaccttactcgtgaagaaattatggaattgatggatagtgtttctaaggaagatcacagcaaaaggagcagttttgtgtgtgtgattctaagtcatggagatgaaggagtaatttttggaacgaacggacctgtggacctgaaaaaactaactagtttcttcagaggcgactactgccggagtctgactggaaagccgaaactcttcatcattcaggcctgccgaggtacagagctggactgcggtattgagacagacagtggaactgacgatgatatggcatgccagaagataccagtggaggccgacttcctgtatgcttactctaccgcacccggttactattcctggagaaattcaagggacgggtcatggttcatccagtcactttgcgccatgctgaaactgtacgcgcacaagctggaattcatgcacatcctcactcgtgttaaccggaaggtggccacggaatttgagtccttctccctggacgccactttccatgcaaagaaacagatcccgtgtattgtgtcaatgctcacaaaagaactgtacttttatcactaaaggaatgactgggagtggggtaggggcatgtttctgttttggtttttttttttggtttttgttttttgtttttttttttttatttgaatgccaaatgagaaaactgtcagggagactttttttttcccctctcatttaaatcaaatccgatgttccaggtcgtcattgaacaataccactgcctgcaatgcagccacaatacaatacctcagctttgatatcaggtagttgaaatgaaatttaattaggaacaaataaatgtcaataatggtacaaccatcatagaagaaattggaaagtcacactttggtaattagagagatttggtgccactatgaatttgaaattacgaagcagtgatgatcttataccccctcctcacatctagaatgtcactttagttttcgttaagcataggaacgataatgtcaagtggtatgtcttagaacttgaatccacgagcagagtcaaaggctggttttggaactgatctgtggaaatgaagagttggagcactgtagcacacattatagctactggttttgtgacagttgaccaggtcacatatttattatttaagacaaaagtcgtgttttattattggaacaaaaataactttatatgagaggaaaaccatgtgtgaacttggttggcttgttgaaggctaccatccttcagtggtggacatgacgacagggtgctacgatccaccagcatttgtttcttacttattcttatgcaaatcagcctaattttacagaccagcaaaatatctaaagagcgattatgcagcagcctcaaattgttgactattagaatggaataaaggaattctacaggaacagaccataataccagctgtcagtcagagcgtaaggaaaggagaggtggcatctcctgtgattggagagaagatggtttgagccggagcagagccatgggcacgtcttcagaaaaggcctgctagttggacccaccttgtgagcactggtctgtgtggatgatgtccaagttaccacatgagactgaaccagatcagaagctcctgcaaaaaggctttcccagagtgctgagcatctcaagaaagttcactggactccatgtacagagtctgtagcatgctgacttttctgttgaagtttacaatgaaaggaaaatgatggtgatatttgtaccgtcactagaaatgaagggccctggcacacgggacttggaaagcatccagcaataggccctgcagcccatgtggaggagctgcagactggagtccacccctcctccccatcagggcgtctgtgctccaggcttccttaatcatggaggtgctgagtcatcgctggctctccctgtgggtccagcatttcccataagcctccttattgcacaaagaaaggaaggaactcacattataactgatagtaggttcttgtttagactggatttactgttaactcttttctaagtaaatacagcatgtggtggtattttaaaatgtgttcccatgtgacaattttataaaagtcagatatcttgcatttttatttcaaaacataaattcagatttaaaattaaaaaaaaaaaaaaaaaaaaaaaa

SEQ ID NO: 522 - DNA, 3169 bp, Homo sapiens
ccgcacgctgaaccggaggaactgcgcctagtcggggcgctgagggaccctccaccgggacgccggcccctccccgggcctctgctcacttgcccccctgcgagcccgtccccctagtcggcctctcggatcggggacgtggggcgagctgagagcaggcccggggtgggtggtcactgtggagaagacgtggctgtcaagatgatagaagtactgacaactgactctcagaaactgctacaccagctgaacaccctgttggaacaggagtccagatgtcagccaaaggtctgtggcctgaaactgattgagtctgcacatgataatggcctcaggatgactgcaagactccgggactttgaagtcaaagatctactgagtctaactcagttctttggcttcgacacagaaacattttcccttgctgtgaatttactggacagattcttgtctaaaatgaaggtacaggcgaagcatctcggctgtgtcggactgagctgcttttatttggctgtgaaatcgattgaagaggaaaggaacgtcccgctggcaactgatttgatccggataagtcagtataggttcacagtttcagacctgatgagaatggaaaagattgtgttggagaaagtgtgctggaaagtcaaagctactactgccttccaatttctgcagctctattactccctcattcgggagaccttgccatttgaaaggagaaacgatctgaattttgaaagactagaagcccaactgaaggcgtgccactgcaggatcatattttctaaggcaaagccttctgtgctggcgctggcaatcatcgctttggagatccaagcactgaagtatgtggagttaacagaaggagtagaatgtattcagaaacattccaagataagtggccgagatctgaccttctggcaagagcttgtttccaagtgtttaactgaatattcatcaaacaagtgttccaagccgaacggtcagaagttaaaatggatcgtgtctgggcgcactgcacgacaactgaagcacagttattacaggataacccacctcccaacaattcccgaaaccatgggttagttggcaaatctggttgttatcctctgtgtacagaacatttcccagtgagatcgtttttgtgctataacttaaggattgaaatactaccttcaatataaagaatacaggatgaaaacagtaaaggaaacgtgagtttgttggtctagacagagaatactgggaggcattcactgtgtaccgcagtctgaagagaaatgagtatcaaacctctagacacatgctcatactgctgtcaaaggactagcgtagaaaagagagtcctccaaaccggaagtttaaatgtagttactaaaatagcacttcttataacttacatatccccccactgtggcttatttaaagttacagaagtccaagcagaacgacaaaagatgtgacccatatatgaacacattttaatctgttcattgattaggagagtgaatatgaacttgcatgatgcccatgttaggtttctggaaactgccggggtatcttaattctctagtattctccctctgtggcagttgggctaatacaaagtaactatacgcatgagaatataaaatcagtctctgatacatacacatttttaccatcaaaatttcttaatcatagcaaagacttacctttttatgattaggaattttttttttaatgtatggcagcacatgcctttaatcccaacactagggaggcagaggcaggtggatctctttgagttcgaagccaggctggtctttacagtgagttccaggacagctggagagctacagaatggagagacgctgtctcaaaaacactcaaaacaaacaaacaaaccataccagtttgtaggcagacttctgttgggttgggtttgtactgtttgcctatgcagtgggattacagcagcagcaacaaaaactgtccctgaagtctttctctgccactgtgacctgagtttcctatggtacgcgatttactctaggaaacctcagcccctcaccacgttagctgttggcaaatggcctcacagttgcggaaagtcccaattctaggcttgggaaagcaatgcttagatttgaattggcccatgaagcattcaaatcaaggctaaagacataaatgtgaaataaaactgtgaaccttcattttaacattgatctcacttcccagatttaatcaatatatacttaggtggtattaaaaatggtaaactgcctaatttaaatctcaaaatttaaactatgaggtttacatcaaagccaacatttcacaaatgtactttttaaggtattaaaagaggtatttaagcagtaaatggtttcttggcacccataaccaagtaatagttaagttagaggtgggacttttttattgctatgagaattacatttaaacttttgggtgttttataaaaagcagatttcacaagttttgaaaattgtgacctttactgaaatttgttacctttaatatttcttctagaggataggtatttataaaagaaaaattcgtcagaattgctgcctcaatctagtcccatttgagaaaatttgtttctactgtctcaataactggatgaaatatcactctgaaaacttgcctattgcactaaagctagtttaggcttgataaaacactccaggaggtttttaccacagactgtttctattaaaactgctgcttctcatgtacaattttgttttaaaaggaaccgagtacatctgcaaaacctaagtcttaagggacgtcaggaggtaccttcagaattataggatcaccatggtagtggggattctccatgctggccttgaatgtttgatcttcactgctgaaatgtgggtagctcctcagcgccctgtagagcctgagtctacctagaatagctgtaaccattttgacaagtaatggataagaaaattatccattgagaagctaaaaacaaaacaaaacaaaaccaaagaacgggtgtattttattcttaacctttgtaaaccatcactgagaacacttcagttcttcctaacagctgttatgcttcgatttgaaaaaaatactgagtggataaccaactaccatcatgctttgggtacacctttcaataaaattactgaaatgc

SEQ ID NO: 523 - DNA, 2296 bp, Homo sapiens
cctgcttgctcaggaactccctcagccgccgcgttctctagccgccgttgctgcccgggacgatgatgccgcgcctgctgtttcgtgcctggccccgctgcccctcgcttgtcctgggagcccctagtaggcccttaagtgctgtctcggggccggacgattatctgcagcacagcatcgtgcccaccatgcactaccaggacagcctgcccaggctgcctatccctaaacttgaagacaccatgaagagatacctcaatgcacagaagcctctcttggatgacagccagttcaggagaacagaagcgttgtgtaagaattttgagactggcgttgggaaggagctgcatgcccacctgcttgctcaggataagcagaataagcacaccagctacatctcaggcccctggttcgatatgtatttaactgctcgagactctatcgttttaaactttaatccatttatggcattcaatccggacccaaagtctgagtataatgaccagcttaccagggcaaccaacttgactgtttctgcagtccggtttctgaagacacttcaggctggccttttagaaccagaagtgttccacttgaacccttccaaaagtgacacagacgccttcaaaagactcattcgctttgttcctccctctctgtcctggtatggagcctacctggtcaacgcatatcccctggatatgtcccagtatttccggcttttcaattcaactcgtatacccagacccaatcgtgatgaactctttactgacaccaaggctagacacctcctggtcctaagaaaaggacatttctatgtctttgatgtcctcgatcaagatgggaacattgtgaatcccttagagattcaggcacatctaaagtacattctctcagacagcagccctgtgcccgagtttcctgtggcatatctgaccagtgagaaccgagatgtctgggcagagctcagacagaagttgatttttgatggcaatgaggaaaccctgaagaaagtggactctgctgtcttctgcctctgcctagatgacttcccgatgaaggatcttattcacttgtcacacaccatgctgcacggcgatggcacaaaccgctggtttgataagtcctttaacctcattgtagccgaggacggcactgctgcagtccacttcgagcactcgtggggggatggggtggcagtgcttaggtttttcaatgaagtgttcagagacagcactcagacccctgccatcactccccagagccagcctgccgccaccaactcctctgcgtctgtggagacgctcagcttcaacctcagcggtgctctcaaggctggcatcactgctgccaaggagaagttcgacaccacggtgaaaaccctcagcattgactccattcagttccagagaggtggcaaggagttcctgaagaagaagcagctgagccccgatgcggtggcccagctggccttccagatggccttcctgagacagtatggccagacggtggctacctatgagtcctgcagcactgcagccttcaagcacggccgcacagagactatccgcccagcctccatctttactaagagatgctccgaggcgtttgtcagggacccctccaagcacagtgtgggcgagcttcagcacatgatggctgagtgttccaaataccatggccagctgaccaaagaagcagcgatgggccagggctttgaccgacacttgtatgctctgcgctatctggcaacggccagaggactcaacctacctgagctctatctggatcctgcataccagcagatgaaccacaacatcctgtccaccagcactctgaacagcccagcagtgagccttgggggctttgcccctgtggtccctgatggctttggcattgcatatgctgttcacgatgactggataggctgcaatgtctcctcctactcaggacgcaatgcccgagagtttctccactgtgtccagaagtgcttggaagacattttcgatgctctagaaggcaaagccatcaaaacttagcttcctagtcgctgaaaagcctccattcttcctcatgaacatggatgttcatgtagctggaaggtgccatcttgtgcccaacaaaactaatcccaaggtgcttccacagccagtgctgcaggctgagctggaagagcccaactgaaggtagtgagaggtcgcagctgtaaagccctctttgttcaggagatagggtttggaaaactaactcagctgtatttattgtttaaatagaaataaaacctggtgttgcttag

SEQ ID NO: 524 - DNA, 3335 bp, Homo sapiens
gtacgcgggtagcacggcctctggccgtggagcaccatgaagtacctggtgagtgtgggcgcggggccggccaggcgggcgggcggtctggaggacgtttcctgggggccccgagtgtcccgccggccgcagagttaccgggcagctcggcacgtaaacgagtccctccctcggtccgcctttcgagtccccgcagctcacggagctagcgtgacgccctccgcagcccttgggtccgggttgcctgagactcagcccgaggcggtatgcagagggactgagaaaccgagatttgctgagggctgcaaaccggcggcgagccgcgacaagaacgtgctggccaaagccctctatgacaacgtagctgagtctccggatgaactctccttccgaaagggtgacatcatgacagtgctcgagcgggacactcagggcctggatggctggtggctctgctcactgcatgggcgccagggcattgtgcctggtaaccgcctcaagattctggttggcatgtatgacaagaagccagcagcacctggaccaggcccacctgccaccccaccccagccccagcccagccttccccagggcgtccatactccagtgcctccagcttcccagtacagtcccatgctccccactgcataccaaccccaacctgacaatgtgtacctggtacccactcccagcaagactcagcaaggtctctaccaagcccctgggcccaacccacagttccagtcacccccagccaaacaaacatccacattctcaaagcaaacacctcatcactcatttcccagccctgccacagacctttaccaggtgcctccagggcctggaagtccagcccaggacatttaccaggtgccaccttccgctggcacagggcatgacatctaccaagtccctccatctttggacacccgcagctgggagggaacgaagccaccggcaaaggtggtggtacctactcgagtgggacagggctatgtgtacgaggcctcccaggcagaacaggatgagtacgacaccccgcgccacctgctagctccaggttcccaggacatctatgatgtgccccctgttcgaggactgcttcccaaccagtatggccaggaggtatatgacaccccgcctatggcagtcaaaggccccaatggccgagacccgttgttggatgtgtatgacgtgccccctagtgtggagaaaggcctgccgccgtccaaccatcattcggtgtatgatgttcctccttctgtgagcaaggatgtgcctgatggcccactgctgcgtgaggaaacatatgatgtaccccctgccttcgccaaacccaagccttttgatccgacccgacatccattaatcctcgctgcacctcctccggactccccaccagctgaggatgtgtatgatgtgccaccccctgctcctgacctctatgatgtgccccctggtttgcggcggcctggccctggaacactgtatgacgtgcctcgagagcgggtgctccctcctgaggtggctgatgggagtgtaattgatgatggtgtgtatgctgtgcccccaccagccgagcgagaggcgccaacagatggcaagcgcctgtcggcctctagcacgggcagcacacgcagcagccaatcggcgtcttccttggaggtagtggtgccaggtcgggagcccctggagctggaagttgctgtggagaccctggctcggctacagcagggtgtgagcaccaccgtagcccaccttctggacctggtgggcagtgccagtggccccgggggctggcgtagtacctctgagccccaggagcctcccgtgcaggacctgaaagctgcagtggccgcagttcatggggcagtacatgagctcctggagtttgcccgcagtgcagtgagcagtgccactcacacttctgaccgcactttgcacgccaagcttagccggcagctacagaagatggaggatgtgtaccagacactggtggtccatggtcaggtccttgacagtggccggggaggtccaggattcactctggacgacctggaccgcctggtggcctgctcacgggctgtgcccgaggatgccaagcagctggcctcctttttgcatggtaatgcctcgctgcttttcagacggaccaaagcccctggccccgggcctgagggcagcagctccctgcacctcaaccccaccgataaagccagcagcatccagtcacgccctctaccctcacctccaaagttcacctcccaggactctccggatggccagtatgagaacagtgaagggggttggatggaggactatgactacgttcatctgcaggggaaggaggaatttgagaagacccagaaggaactgctggaaaagggcaacatcgtgcgacagggaaaaggccaactggagctgcagcagctgaaacagtttgagcgactggagcaggaggtgtctcgtcccatagaccatgacctggccaactggacaccagcccagccccttgtgccggggcggacagggggactggggccttcagaccgacagctgctgctcttctacttggagcagtgtgaggccaacctgaccacactgacagatgcggtggacgccttcttcaccgcagtggccaccaaccagccacccaagatctttgtggcacacagcaagtttgtcattcttagtgcacacaagcttgtgttcattggggacacactgtcacggcaggcaaaggcagctgatgtgcgaagcaaagtgacccactacagcaatctgctgtgtgacctcctgcgtggcatcgtggccaccaccaaggccgctgccctgcagtacccatccccatctgctgcccaggacatggtagacagggtcaaggagctaggccacagcactcagcagttccgccgtgtcctgggccagctggctgccgcctgaaagcagaagactgggctgtgaggctggggagtgggtagcggtggtgtgagctacccaggcgctcgtcttgaagtggagatcctgcaggtttggggacaggtaaccccagctctgctttgggcctggtgccctcaactgtccagggatttgtacatatttatatcaaggcaggatgcagaatgcctcctcggagaggctgaggagccccgtcagagtggaccatgggctgggatcaccagggttggggcacatgggctccagtccacagggctccctgggacaggaagtacagtgtggtgtacacctctgcaccaagaaaacctaaagaactatttttcactattgatttttttccaatcatttgactaatagtctacatttaataaaatttt

SEQ ID NO: 525 - DNA, 3335 bp, Homo sapiens; identical to SEQ ID NO: 524

SEQ ID NO: 526 - DNA, 3545 bp, Homo sapiens
ggtctcccctttggaaattttcctgcttttgcaaaatgatgactatttctttgatttggggaattgccgtgttggtgagctgttgcatatggtttattgttggaataaggagaaggaaagctggtgaacctcctttggagaacgggttgattccgtacctgggctgtgctctgaaatttggatctaatcctcttgagttcctaagagctaatcaaaggaagcatggtcacgtttttacctgcaaactgatggggaaatatgtccatttcatcacaaactccctgtcataccacaaagtcttatgtcatggaaaatattttgactggaaaaaatttcattacactacttctgcgaaggcatttggacacagaagcattgacccaaatgatggaaataccacggaaaatataaacaacacttttaccaaaaccctccagggagatgctctgtgttcactttctgaagccatgatgcaaaacctccaatctgtcatgagacctcctggccttcctaaatcaaagagcaatgcctgggtcacggaagggatgtatgccttctgttaccgagtgatgtttgaagctggctatctaacactgtttggcagagatatttcaaagacagacacacaaaaagcacttattctaaacaaccttgacaacttcaaacaatttgaccaagtctttccggcactggtggcaggccttcctattcacttgttcaagaccgcacataaagctcgggaaaagctggctgagggattgaagcacaagaacctgtgtgtgagggaccaggtctctgaactgatccgtctacgtatgtttctcaatgacacgctctccacctttgacgacatggagaaggccaagacgcacctcgctattctctgggcatctcaagcaaacaccattcctgcaaccttttggagcttatttcaaatgatcaggagtcctgaagcaatgaaagcagcctctgaagaagtgagtggagctttacagagtgctggccaagagctcagctctggagggagtgccatttacttggatcaagtgcaactgaatgacctgccggtactagacagcatcatcaaggaggctctgaggctttccagtgcatccttgaatatccgcacagctaaggaggacttcactctccatcttgaggacggttcctataacatccgaaaagatgacatgatagctctttatccacagttaatgcacttggatcctgaaatctacccagaccctttgactttcaaatatgaccggtaccttgatgaaagcgggaaagcaaagaccaccttctacagtaatggaaacaagctgaagtgtttctacatgcccttcggatcaggcgcgacaatatgtcctggaagactctttgccgtccaagaaatcaagcagtttttgatcctgatgctctcctgctttgaactggagtttgtggagagccaagtcaagtgtccccctctagaccagtcccgggcaggcttgggaattttgccaccactacatgatattgagtttaaatataaactgaaacactgatacgtggttggaagaagcgaacactggatgatgtcacttggcggctgagagtcatcactaaacaggccttcgggaccaatgctcactgatgcgccctagcgactggattagtgggaagaactttgttctcgctgcccacattcctgggtgttcacatagctggggccagagcttcatcactttcagaaagcaatgtcttttgtatttattttcaaaatgaagatattccaattggcaggatatttttcctaaggaaattgctttatatttttatgaaaactaccaattaattatgaaagggcttgaaattcacgttttagtgaaattactgatttttcactagtaaggttcttcaggtgtgaaactgtattataaaaatgttgtaatgggtcacactgtgctttgcataaaggtaaaggaaactatgtttcagccttttctgtgtctatgagcttcgaaaataatcttactgttctagaaacactggggaggtttcgacatgctctcgctatattttattttactgttgctagaaattttcattccagttttcaactaccttatctttcccccattttgacatgcatgccaatgagaagagtattttttaggaattaacaaggcacctcccagaaccctaccctgagacttttaagcctttaatcccagcactcgagaagtagagccaggcagatctctgagtctgaggttattctggtctacatcagctccagacaagccaggactacagaatgggatcttgtctaaaaaatacagctaatctttatgtcataactgattatgaatcaacctaaaagataaattttcaatcaggactcagagaaaatgagcaattaaaaaacttagctctgaggtatgtggaattcattaagtacaagttgacattacatgttctttaaaaatagtttatgttttatctctaaatgccctgcagatgaagaataataatgaaaagttgaataatactgtttaaacactaagtgcaataatgctttggtaatgtactttaagagaatcattagccgtgccagttttactaaaatatatttatatgtaaattatatttatctttttcttataccataaatataaaaatattgcaacatttagtaattttaaaattatatacctttcagaaaatgatgtatgaatgtttgtatgttttttaactttgaacagaacatttaaattattcatctacggtgatttttatcttatttatttctttttgtctcattcatatcttgaagaaatccaaaaatatctgaaggaatcgctcactcaaatgtctccctatggttacagaaaaattcaataccatgtttttgtcctcggggactgaagcagggtgtcgtgggtgccgagcagaggctcctgctgcagcgagctttatccacgggactccttaaacttttaaaatcttatcactattatcatgcatttattacctaagtaggatatttccctttcctttttcatttcagccgagtcccttagcaacccaggctgactgggaccctccatgtagcttaagctgtgaactcactgtacttcctgttttcacttattttaggaagtaattttccctatcagaaattttaattgtttagatgatgtataagagtaacacaattctgttatatactaatctgtagtaaactaaatttgttcttagaacaagtttgatgactctcaaattgaatgtatccatacatctttccatggcttcttgaatgcccatttctcatacacagaatgatgggtttcacggtgatgtcttcctttcatgtctttattcttgtgcggtgatggttggcaaatgatacccatggagcaaggttactcttcctatttctgtgcagcctaagtgttaagaataatttttaaatacttggagggaaggcacattttgtgtcatatgtgaagtgacatgtgacacacagactagcaaatccttgagtaaaattttattgggat

SEQ ID NO: 527 - DNA, 2602 bp, Homo sapiens
ctgctgcctgcactttgccctggtcctccaatggcttcaacccgtgccaggcccatgctgcctctgctcctggtcctggtcgccgttgtgatccccgggcctgtcggtgctcaggtatccatccatcccacagaagccttcctgcctcggggtggatccgtgcaggtgaactgctcttcctcttgcgaagacgagaacctcggcctggggttggagactaactggatgaaagacgaactatcgagtggacacaactggaagctcttcaagctgagcgacattggggaagacagcagaccactgtgctttgagaactgtggcaccacgcagtcctcggcttctgccaccatcactgtgtattcgttcccagagcgagtggagctggatcctctgcccgcctggcagcaggtgggcaagaacctcatcctgcgctgcctggtggaaggcggagcaccgcggacacagctctcagtagtgctgctccgtgggaatgagacactgagccgccaggcagtggatggggaccccaaggagatcacattcacggtgctggccagcagaggcgaccacggagccaatttctcatgcttcacagaactggacctcaggccacaagggctgtcactgttcaagaatgtctccgaggtcaggcagctccggactttcgatcttccgactagggtcctgaagctcgacacccctgacctcctggaggtgggcacccagcagaagttcttgtgttccctggaaggcctgtttcctgcctctgaagctcagatatacctggagatgggaggccagatgctgaccctggagagcacaaacagcagagattttgtgtcagccactgcctcagtggaggtgactgagaagttggacagaaccctgcagctgcgctgtgttttggagctggcggaccagaccctggagatggagaagaccttgagaatctacaacttttcagctcccatcctgaccctgagccagccggaggtctcagaaggggaccaagtaactgtgaagtgtgaagcccacggtggggcacaggtggtgcttctgaacagtacttcccccaggccacccacctcacagggtacttcccccaggccacccacctcacagatccaattcacactgaatgccagcccggaggatcacaaacgacgcttcttttgctctgcggccttggaggtggatgggaagtccctgtttaaaaaccagaccttggaactccatgtgctatatggtcctcacctggacaagaaggactgcttggggaactggacctggcaagaggggtctcagcagactcttacatgccagccccaggggaatccagcccctaatctgacctgcagccggaaagcagatggtgtcccgctgcctatcgggatggtgaagtctgtcaaacgggagatgaatggtacctacaagtgccgtgcctttagctcccgtgggagtatcaccagggacgtgcacctgacagtgctgtaccatgatcagaatacctgggtcataattgttggtgtgttggtactgatcattgcgggcttcgtgatcgtggcgtccatttacacctattaccgccagaggaagatcaggatatacaagttacagaaggctcaggaggaggccctaaaactcaaggtacaagccccgcctccctgagcccactggacaggacacctgcctgggccccgctgctcttgaacagatcaatggacagcatttacccctcacccacctcctctggctgtcacaggacaggacagtggcctggggatgcatacttgtagcctcaggcctaagaggactcggaggggcaagactgtgaactcgtgacctggacacacctacagcctggtgggcctgcagccaagaaaggctgacttccttctctattacccctgctgaggggccccctaccttaggaaggtgtgatatccggtagacacaagcaagagaagaaaaggaacaccatgcttcctctgacatgggaaagctgggacactgtccccaactcttgttgatgtatttattaattcagagttctgacagttatttattgagtaccctgtacagacactagaggagtgagcaggttaacatgtaagttattgcctagaccctggtgaaggggcacaacagagtctggggaaagatcatacgggtttgggcttctccacaggtcagggtgctttcctcaaaagagctgatttctttcacgagtcatataaatactatgtggacgagcagtggccctctgctcgtagacctctctgggacccctgcctcctcccacagcctggagtctcccagcaccagcatgggtgaccacctccccacctacatacattcctacctttgttcccaatgtcaaccaccatgcctaaatatggacgctcacctttagcagctcaacaatggagtctcatgcccgtgaaattatggtcaatccctgcatgcctccacccggctccacctcaaagagaatgcctgggagaaaatgttccaaccacttagaagggtcctgcaagctgttgtgggagggtaggcacccctcccagcgcagaagcctttcctttgaatcaataaagtttta

SEQ ID NO: 528 - DNA, 1545 bp, Homo sapiens
gtgaactcgtgggagtcccgccctgtgcagagttctgtccagcaagtgaggaagagagcgttggttctcccgaaacagaagagatggctttcttcagcacccagcctccatacatgaacccagtcatcccctttactggaataatccaaggagggttgcagaacggacttcagatcaccctccaggggaccgtccacccttttccaaataggattgcggtgaactttcagactggcttcagtggaaatgacattgccttccacttcaatccccggtttgaggaaggaggatatgtggtttgcaacacaaagcagaatggaaagtgggggcctgaggagaggaagatgcagatgcccttccagaaggggatgccctttgagctttgcttcctggtacagaggtcggaattcaaggtgatggtgaacaagaacttctttgtacagtactcacaccgcgtgccctaccacctcgtggacaccatttcggtctcgggatgcttgcacctgtccttcatcaacttccagactcagggctttcagcctgcccaccaggcacccgtggctcaaactatcatccacacagttcacagcatccctggacagatgctctctactcctggaatccctcctatggcataccccaccccagcctatactatacctttcttcaccagcatcccaaatgggttttacccatccaagtccatcaacatatcaggcgtggtcttgccagatgctaagaggttccatatcaaccttcgctgtgggggtgacattgctttccacctgaacccccgtttcaatgagaaggttgtggtccgaaacactcagatcaacaactcctgggggcccgaggagcgaagcctgcctgggagaatgcccttcaatcgtggccagagtttctcagtgtggatcttatgtgaaggtcactgcttcaaggtggccgtggatggtcagcatatttgtgaatattaccaccgcctgaagaacttgccggatatcaacactctagaggtggccggtgatatccagctgacacacgtgcagacctaggaaggtctctggcttagggatgaaggctgaggaaccctacctgagtcttgtcacctcctccctgtctcagccctgcctccccaaatcctgtcatcaaagagagcctcattggcaggagttccaggaaggtggcattcccaattcacaccctccacaaagggggagtcctgggctatgggacacatggctgtgagcccacagtgtcagccattgctcccaagctagtcatcttctgagggaagtgacctccctgggtttgcccctttctctgacctttcccttcacccctccaggagggccaccttgatgtcatcccattggcctccagctgacccagaatgtccacattaccttttccccaatctttcccaatgcccataaaataaagaatatcaacgcttgtctacaaaaaaaaaaaaaaaaaaaaaaaaaaaaaaaaaaaaaaaaaaaaaaaaaaaaaaaaaaaaaaaaaaaaaaaaaaaaaaaaaaaaaa

SEQ ID NO: 529 - DNA, 1545 bp, Homo sapiens; identical to SEQ ID NO: 528

SEQ ID NO: 530 - DNA, 2356 bp, Homo sapiens
ctcgcacgcccttcggctgccgggagcccgagctcccttccgccttccgacgcgctgtccgccagccggtggatgtgcggcaacaacatgtccgccccgatgcccgccgttgtgcccgccgcccggaaggccaccgccgcggttattttccttcacggattgggagatactgggcacggatgggcagaagccttcgcaggtatcaaaagttcccacatcaaatacatctgtccacatgcgcctgttatgccagtcacactaaacatgagtatgatgatgccttcttggtttgatattattggactttcaccagattcccaggaggatgaatctggaattaagcaggcggcagaaactgtaaaagccttgatagatcaagaagtgaagaatggcattccttctaacagaattattttgggaggattttctcagggaggcgccttatctttatacactgctctcaccacacagcagaaactggctggtgtcactgcactcagttgctggcttccacttcgggcttcgttttcacaggggcctatcaatagtgctaatcgagatatttctgttctccagtgtcatggagactgtgaccctttagttcccctaatgtttggttctcttactgttgaaagactaaaaggattggtaaatccagccaatgtaaccttcaaagtctatgaaggcatgatgcacagctcatgtcagcaggaaatgatggatgtcaagtacttcattgataagctcctacctccaattgattgatgtcactaagaggccttgagtagacgttcaccagcatcacagtagtggagtataaacctttccccatgactgatcataaaactgctaatgtttgcagtgttaaaatgttttgcaaatacataccaatgagacagactaaatgatgtctccctcatgggaaatgtatgatccttttacgtttctatgcatatatttgtataatacaattcagaatatactagtattacagtaggtaagtgaagcaactagcttctttgtctcaaattaattcagcaaaataagataacacaagcagagttttattacatcatttcaattactagtatgctctctgaaagtttgttcaggtctaaacaagctgttaagatgtaagtgacttcttaattctgtgagttagactatagttttactccacaagtgttgagtcatcacgcagtgtctgtgtttctgtttgtattcacacatacgtgactgggatacctaagatggtattacatcatccctgaccatagggatcgtgctcttaagtgtcaaaagtaatactgctctctgcaattaatcgccctgctactgggggaccaggcttccccccttcgatgtaacttttctcctttcaagaagaaaaaggtagattcttttttggtttccatagaaaagtaatattgcctccctgtcataaagaaatatctgtcattatatattattttgacattctgaaacacagacatacagtatttccaatataggtaatatgaaaagaaaccacacattacttaagcgtacatatttcaaataacaatcttcagaccagaatcttcagtgctggtcattaattctgtggttttatttttctataaaaacttaaagggtaaataatatcttggcgtgtttagaaatacttgtgactggttttagaatataatttcttaaacatagcagagtttaagtttacattttctgtacatgttatgcttaaaaccaaatactgttcaagatgagcagtcaaatttgttttattttcatctgggtaacatgctaatttgaaattttcatcttcagtaaaggagcttttgataatcagtctcctgtgcaaatattaaaataacaatcatttgattttaaatcatcaacatgttcaaaatactgctgaaaattatttaatttatggataataaggactggttagaacccacatatataaacccatatttataactgtttccacacagttgagtatgttacaaaaattatggttatttctgaacagtttcttttcctgctgtttttcaaccgaccaagaagaaggaagcatctttgtaagcaggagctaactgatgtggggtcatttggtgtgtccgagatagagtgttaacaatgaagccgattgtttatgtctagatttaaaacaatttcaaacaatcatttactattttgctttactttgaagagcatacatttacttcagttattgtatctgtaaaaatttatttggggtaagaaatattccgttgaatttgtgtgctgtaatgtgggaaaatgtcatgtttttcacagtttctatcaatgtgaaataaaatttaattttggcttt

SEQ ID NO: 531 - DNA, 1687 bp, Homo sapiens
cccagagactgccgagccgggtccgtgtgccgccacccactccggacacagaatatccagttatggataaaaatgagctggtgcagaaggccaagctggccgagcaggcagagcgatacgatgacatggcagcctgcatgaagtctgtcactgagcaaggagccgagctgtctaacgaggagaggaaccttctctctgttgcttataaaaacgttgtaggagcccgtaggtcatcttggagggtcgtctcgagtattgagcagaagacggaaggtgctgagaaaaagcagcagatggctcgagaatacagagagaagatcgagatggagctgagggacatctgcaacgacgtactgtctcttttggaaaagttcttgatccccaatgcttcgcagccagaaagcaaagtcttctatttgaaaatgaagggtgactactaccgctacttggctgaggttgctgctggtgatgacaagaaaggaattgtggaccagtcacagcaagcataccaagaagcatttgaaatcagcaaaaaggagatgcagccgacacaccccatcagactgggtctggccctcaacttctctgtgttctactatgagatcctgaactccccagagaaagcctgctctcttgcaaaaacagcttttgatgaagccattgctgaacttgatacattaagtgaagagtcgtacaaagacagcacgctaataatgcagttactgagagacaacttgacattgtggacatcggatacccaaggagacgaagcagaagcgggagaaggaggggaaaattaaccggccttccaacctttgtctgcctcattctaaaatttacacagtagaccatttgtcatccatgctgtcccacagatagtttttttgtttacgatttatgacaggtttatgttacttctatttgaatttctatatttcccatgtggttttatgttttaatattaggggagtagagccagttaactttagggagttactcgttttcatcttgaggtggccaatatgggatgtggaatttttacatgagttacacatgtttggcatagttagtacttttggtccattgtggcttcagaagggccagtgttcaaactgcttccatgtctaagcaaagaaaactgcctacatattggtgtgtgctggcggggaataaacaggataatgggtccagtcatgagtgtagtctgtgtgggtactgtaaggcttggagcacttgtgaggctgggacacgaacaccctgtggatgcacgctaagaccgtgtgtctgcgtgcacacccttgaccacagctccagaagttgtctgtagacaaagttgtgacccaatttactctgataagggcagaaacggttcacattccattatttgtaaagttacctgctgtttgctttcattatttttgctacacattttatttgtatttaaatgttttaggcaatctaagaacaaatgtaaaagtaaagatgcagtacaaacgagttgcttggtgttcccggctccatgcggatcaagcacagcggtaaacaaaatcccatgtatttaactttttttttttaagttttttgttttgttttgtttttgcttttgtgattttttttctctttttgatacttgcctaacatgcatgtgctgtaaaaatagttaacagggaaataacttgagatgacg

SEQ ID NO: 532 - DNA, 1687 bp, Homo sapiens; identical to SEQ ID NO: 531

SEQ ID NO: 533 - DNA, 3021 bp, Homo sapiens
cagagcctggcgctgaggaaggaatctggcagtcgagagctgactccagccgacggaacctgcagcccttgctccggacagcagcgcgccgggcaggagtccgggatagcgaagcgcagagcaatcagcagagcctgcccggagctccgtgcaaccggcaactccgacccacatagcccgccgagctcccgccgccggtccgggcagcatgagacgtgcggcgctctggctttggctctgcgcgctggcgctgcgcctgcagcctgccctcccgcaaattgtcaccgcaaatgtgcctcctgaagaccaagatggctctggggacgactcagacaacttctctggctcaggcacaggtgctttgccagatatgactttgtcacggcagacaccttccacttggaaggatgtgtggctcctgacagctacacccacagctccagaacccaccagcagggataccgaggccaccctcacctctatcctgccggctggagagaagcctgaggagggagagcccgtggcccacgtggaagcagagcctgacttcactgctcgggacaaggagaaggaggccaccaccaggcctagggagaccacacagctcccagtcacccaacaggcctcaacagcagccagagccaccacggcccaggcatctgtcacgtctcatccccacggggatgtgcaacctggcctccacgagaccttggctcccacagcacccggccaacctgaccatcagcctccaagtgtggaggatggaggcacttctgtcatcaaagaggttgtggaggatgaaactaccaatcagcttcctgcaggagagggctctggagaacaagacttcacctttgaaacatctggggagaacacagctgtggctggcgtcgagcctgaccttcggaatcagtccccagtggatgaaggagccacaggtgcttctcagggccttttggacaggaaggaagtgctgggaggtgtcattgctggaggcctggtgggcctcatctttgctgtgtgcctggtggctttcatgctataccggatgaagaagaaggacgaaggcagttactccttggaggagcccaaacaagccaatggcggtgcctaccagaaacccaccaagcaggaagagttctacgcctgatggggaaatagttctccccccacaacccctgccactcactaggctcccatttgcctcttctgtgaaaaacttcaagccctggcctccctaccgctgtgccgtctcctctgcacccagacccttctgcccgagcggtctcagggtgtgctgggaattccttctcctctgacttctgctagaagcttgggtgcagagggtttcttgcattttgtctttctaccacagccacgcctgttgtccactcttctgacttggcttctccaaatgggaggagactcagctctggacagaaagggaacccaactgctttggacctagatggcctattgtgactggaggatcctgaggacaggagaggggcttcaacagacacgccatagcacttacccatagagaccattagggttggctgtgctgtggtagggaaggagtccagggctccttggaattcacttctcattgtggggaggtctactttagacaacttggttttgcacatgtttcctctaatttttctgttttagagccccagcagaccttacttctggggtaaggcaagtcagttgactggtgtccccacctcgcttccctaatctacattcgggagaccgcatcggggttaaataagacttttcattttcgtttttgtttttaacctagaagaaccaaatccggacaccaaaacgtaggcttagtttgtgtgttgtctctgagtttgtcgctcatgcgtgcaacagggtatggactatctgtttggtgccccatttttggtggcccataagtaggctggctagcccaggatgccatggagtagccacctcttgaccagtcatgcctgtgtgcatagactcagggccatggcctttgtgacattggaagagcctgtgtgagaacttcctcctagattagtctagggatggaggggaggagactgtatagtttgggaggaggggtgacaagggtgtccaagactctcccacctttggtactaactctggtcaccctttctcctggaagttgacaagacacatcttgagtatggctggcactggctcctccatcaagaaccaagttcaccttcagctcctgtggccctgttcccaggctggagtcagaaatgtttcccaaagagtgagagtcttttgcttttggcaaaacgctacttaatccaatgggttctgtacagtagattttgcagatgtaataaactttaatataaaggagtcctatgaactctactgtttctgcttcttattctctgggctggtggtacagacgtagccagcctctgcccaaacccgggtagctcagagaagcttggctcaaggctacgtgcctccagtcctctgaggggtaggatcctggatccagggttccgctggtttgttgttttgttttgtttttcttttggctaaacttcttttggaagttggtaggttcagccaaggttctgcaggacctgacgtctgttcttctagatggtttaagtaatcgggactctagcacatcttgacctggggtcactacagctaagcttgctttgcagagcagatacctgggacagccttcatccctcatggttgctgggacacttctgaggactccttgcttacttagctcagcgatgttccagctgctggctaggctgctcagtggcgcggctagacaaaagatctgtgccctgtgtttcatcccagaatttgctgccagatcgtacggctggatgtgatgtggggtggggtggggtcagatctgagacagcactcaactgagggcttgtgagacagtgtccaagtctcaggctggggccattcatataattgcaataaatggtacgtgtccatttggacagcagacaaaaaaaaaaaaaa

SEQ ID NO: 534 - DNA, 1666 bp, Homo sapiens
cggcagccgagtcggattgagctgctgcagacgccaggccactccagccagcactgccgttttcacgccccggctgcagacagctaggaggctttatctagtttgaaccaggctgctggagctcgctccttccctctctttttttccacgaggctgtttttttatttggctgcaattgcatgaaatcccaatggtgtagaccagtggcgatggatctaggagtttaccaactgagacatttttcaatttctttcttgtcgtctttgctgggaactgaaaacgcttccgtgagacttgacaatagctctggtgcaagtgtggtagctatcgacaacaaaatagagcaagctatggatctggtgaaaagccatttgatgtatgcagttagagaggaagtggaggttctgaaggagcagatcaaagaactaatagagaaaaactcccaactggagcaggagaacaatctgttgaagacactggccagtccggagcagctcgcccagtttcaggcccagctgcagactggctcccctccggctaccacgcagccacaggggaccacacagccccctgcacagccagcgtcccagggctcaggatcaaccgcatagcctgctatgccccaacagaactggctgctgctgtctgaactgaacagaccgaagagatgtgctagtgagaagccgcctccagtcacccatttcattgctgtctgcgaaagagacgtgagactcacacatgctgttctcgctttctccccagtattaagcactcatatgcttttggcttgaagaaatatactagttgagtgaattaaaggttaaacagagagtgagcatggatgtaccctgtgcaacgtggcagatgtctgaggaatggtttgattgacgctgaggaggagctctgtgccttttcaaccctccccagccgcccactctactcccaagctctggggctcgcctgcatggggctcagaaggtgggctgctcctggattttgtgttctcctctccttcccttcaaagaatttgagaggccagaaacgagactgcaaagggggggatgcagtccttttacaaaaccgacaactgtcaccaaagcttataaaacaggacagtactgtccctcttttctgaaacatcagaagacacaaaactgttagtgacacaacggtgacaggtagctgggacctaggctatcttattatgaaggttgttttgcttgttgtatatttgtgtatgtagtgtaacgaatttgtacaatagaggaccgtaactactgttaggttgtacagattgaagtttagatgttccattggctgtctgaaaaggtgtggattgtccttcctagagagatctacttaaaaactgcttcgtgacaaaaaccacacctgaagaaattttaagaatttggcacagttagtcactttgtgtcacccggaatctagctgctgagtcttgcaaagtaaaccccctgttgactgatgtcagttgagctagtgaatgaatagatggagaaacgtcagtcagttgctgaggaagtggatttcccagtaggggtttctgcagctcacctgtatagtcctgcgcatgttccccacacagaacccactgtatttacctgttctacttgtcacctttcaataaagcatatcaaatgttgatacc

SEQ ID NO: 535 - DNA, 1689 bp, Homo sapiens
tgcagccagctagcgagaaggcgcgagcggcggcgcagccagcagcctcccgccagccggcgagccagtgcgcgtgcgcggcggcggcctcggcggcgaccgggaagcggacgggcgggcgaggcgagcgaggcaggcggtgcgggcgtgcgaggcgaggccgatcgcgagcgacatgggggaccgagagcagctgctgcagcgggcgcgactggcggagcaggcggagcgctacgacgacatggcctccgccatgaaggcggtgacagagctgaatgaacctctatctaatgaagatagaaatctcctctctgtggcctacaagaatgtagttggtgccaggcgatcttcttggagggttattagtagcattgagcagaaaaccatggcagatgggaatgagaagaagctggagaaagtcaaagcctatcgggagaagattgagaaggagctggagacagtttgcaatgatgtcttggctctgctcgacaagttccttatcaagaactgcaatgattttcagtacgagagcaaggtgttctacctgaaaatgaagggcgattactaccgctacctggcagaggtggcttctggggagaagaaaaacagtgtggttgaagcttctgaggcagcgtataaggaagccttcgaaatcagcaaagagcacatgcagccaacacaccccatccggcttggcctggccctcaatttttctgtgttctactatgagatccagaatgcaccagagcaggcctgcctcttagccaaacaagccttcgatgatgctatagctgagctggacacattaaacgaggattcctataaggactccactctcatcatgcagttgctgcgagacaacctcaccctctggacgagcgaccagcaggatgaagaagccggagaaggcaactgaagacccatcaggtccctggcccttcctttacccaccacccccattatcactgattcttccttgccacaatcactatatctagtgctaaacctatctgtattggcagcacagctattcagatctgccctcctgtcccttggaagcagtttcagataaaccttcatgggcatttgctggactgatggttgctttgagccacagagcgctccctttttgaattgtgcagagaagtgtgttctgaacgaggcattttattatgtctgttgatctgtagcaaatccatgtgatggtaattgagtgtagaaaggagaattagccaacacaggctatggctgctatttaaaacaagctgatagtgtgttgttaagcagtacatctcgtgcatgcaaaaatgaatttgaccctctcaccccttctttcagctaatggaaactgacacacgacaacttgttccttcaccatcagctttataaactgtttctcgtgagctttcaggcccctgctgtgcctctttaaattatgatgtgcgcacaccttcttttcaatgcaatgcatcagaggtttttgatatgtgtaacttttttttttggttgtgattaagaatcatggatttattttttgtaactctttggctattgttcttgtgtaccctgacagcatcatgtgtgtcaacctgtgtcaatcatgatgggtggttatgaaatgccagattgctaaaataaatgttttggacttaaaaagagtaaataaatgctgctttggggatattaaaa

SEQ ID NO: 536 - DNA, 2415 bp, Homo sapiens
cacggcgctccttagggccaccgctcggcgcgccgggacagaccctccccactcctgcctgcaggatcggaacgtcaattaacggctgacactgccccccacctcttcccacccatctgggctccagcgaggaacggatctcggggtacaccatgatcttgccatttttagtactggccatcggaccctgccttaccaactcatttgtgccagagaaagagaaagaccccagttactggcgacagcaagcccaagagaccttgaaaaatgccctgaaactccaaaaactcaacaccaacgtggccaagaacatcatcatgttcctgggagatggtatgggcgtctccacagtgacagctgcccgcatccttaagggccagctacaccacaacacgggcgaggagacacggctggagatggacaagttcccctttgtggctctctccaagacgtacaacaccaacgctcaggtccccgacagcgcgggcactgccactgcctacttgtgtggcgtgaaggccaacgagggcaccgtgggagtgagcgcggccactgagcgcacgcgatgcaacaccactcaggggaacgaggtcacgtccatcctgcgctgggccaaggatgctgggaagtccgtgggcatcgtgaccaccactcgggtgaaccacgccactcccagtgcagcctatgcgcactcggccgatcgggactggtactcggacaatgagatgcgcccagaggctctgagccagggctgcaaggacatcgcctatcagctaatgcacaacatcaaggacatcgatgtgatcatgggtggtggccggaagtacatgtaccccaagaacagaactgatgtggaatatgaactggatgagaaggccaggggcaccagactggatggcctggacctcatcagcatttggaagagcttcaaacctagacacaagcactcccactatgtctggaaccgcactgaactgctggcccttgacccctccagggtggactacctcttaggtctctttgagcccggggacatgcagtatgagttgaatcggaacaacctgactgacccttccctctcggagatggtggaggtggccctccggatcctgacaaagaatcccaaaggcttcttcttgctagtggaaggaggcaggattgaccacgggcaccatgaaggcaaggccaagcaggcgctgcatgaggccgtggagatggatgaggccatcggaaaggcgggcaccatgacttcccagaaagacacgttgactgtggttactgctgatcactcccacgttttcacgtttggtggctacacccccaggggcaactccatttttggtctggctcccatggtgagcgacacggacaagaagcccttcacagccatcctgtatggcaacgggcctggttacaaggtggtggacggtgaacgggagaacgtctccatggtggattatgctcacaacaactaccaggcccagtccgctgtccccctgcggcacgagacccacggtggggaagatgtggcggtctttgccaagggccctatggctcacctgcttcacggcgtccatgagcagaactacatcccccacgtcatggcgtatgcctcctgcattggagccaaccttgaccactgtgcctgggccagctctgcgagcagcccctccccaggggccctgctgcttccactggctctgttccccctacgcaccctgttctgagggcccaggtcccacaagagcccacaatggacagccggctcccctccctttgtggcctgccacctggccgcccacactcaacggggaggcccaggcaacctcgagcaggaacagaagtttgctacctgcctcacttccgcccggaaccctccgtgggtcggattcctggctctgccgttgtttctctattcactgccttttggccagcagggtgggtttctctcttgggccggcaggacacagactgcgcagattcccaaagcaccttatttttctaccaaatatactctccagaccctgcaaccatcatggaacattccagatctgaccttctctcccctaccccttctctctggaacactgggtcccatagtcacagccagtccctcaacccaaccctccttggagggaagaccaggtctgctcagggtgagactcccaggaagccacctccggggttggctgtctacccagggtggccaggctgggaagaacaacccagccggacaggacgcacacactccccacccagctccagagactcgccaacccttcactgaagcgactcccctgtttggaatagcaaaaaaaaaaagaaagaaaaaaaagaaaaaaattttaatttctctttttggtgttggttaaaagggaacacaagacatttaaataaaatgttccaaataaaaaa

SEQ ID NO: 537 - DNA, 1150 bp, Homo sapiens
gcagcagcagcagcaccagcagcacttgggggaaaagctagaggctagagtcatggatgaccagcgcgacctcatctctaaccatgagcagctgcccatcctgggccagcgtgctagagccccagaaagcaattgcaaccgtggagtcctgtacaccagtgtctctgtcctggtggctctgctcttggctgggcaggccaccactgcttacttcctgtaccagcagcagggccgcctggacaagctgaccgtcacctcccagaacctgcaactggagaaccttcgcatgaagcttccgaaatctgccaaacctgtgagcccgatgcgcatggctactcccttgctgatgcgcccactgtccatggataacatgctccaagcgcccgtgaagaatgttaccaagtatggcaacatgacccaggaccacgtgatgcacctgcttacgaagtctggacccgtgaactacccacagctgaaggggagcttcccggagaatctgaagcaccttaagaactctatgaatggtctggactggaaggtctttgagagctggatgaaacagtggctgttgtttgaaatgagcaagaactccctggaggagaagcagcccacccagactccacctaaagagccactggacatggaagacccatcttctggcctgggagtgaccaagcaggatatgggccaaatgttcttgtgaagacagaagccagctctgcacggcggcacgtcccctgctcctcagcccttcttacactccctaacatcacacccattccgtcttcctgcacctgggcttgagactggtatctgcttcaccgtccctgacacaacaaatgaaaccggaacagaatgagaacactggagggagggccttgctgcctacccccatctaaaggacccccatttctgacccattagcagtctttaatgtggggctctgagatctaggcccactgacagggataggggatgccctacccttaatctaggctggatacatttgctgtcttctcaaggaagaggccaagccctcccagcaacccttcctcatgtcctgccgacgcccctgggatccctgctcagccaagcttgtcagcagcctgtaggaccatggttcacgtgacaataaaaggtagaaggtaaa

SEQ ID NO: 538 - DNA, 1150 bp, Homo sapiens; identical to SEQ ID NO: 537

SEQ ID NO: 539 - DNA, 1322 bp, Homo sapiens
cctccacccgaaaccaggatggcggtgtctgccttccagctgtggcgtgcgggcgggctgctaagaagaaacttcctgactcactcgtcttcttggaaaatccctcctcgtgtcctcaaatcctcacaaccagaagctctactcagtgtaacaaataatgccctatgtttcgcacctctgcagacatttactgatgaggatattatgatgcagaaggcagtcaaaaaatttgcacaggaacaaattgctcctttggtttcaactatggatgaaaattcaaaaatggagaaatcagtgatacaaggattattccaacaagggatgatgggcattgaagttgaagcaaaatatggaggaacagaagcctccttcttgtgctctgtcctggtgatagaggaactagctaaggtggatgcgtccgtggctctcctatgtgacatccagaacacagtcattaacaaactgtttaggaagcacgggacagaagaacagaaggccacctatttgccaaagctggttacggaaaaattagggagtttttgcctctctgaagctggagctggtagcgactcttttgctttgaaaacaagagctgataaaagtggaaattactacgtcatcaatggatcgaagatgtggatcagcaatgctgaacatgcagagctcttcctggtttttgcaaatgtggaccccccctctgggtacagaggcatcacctgcttcttagtagaccgagatacagaaggttttcaaatagggagacgagaaaacaaaatggggatcagagcttcttccacctgtcagttaacatttgaaaatgtcaaggttccagaaaccagtgttttggggaaaattgggcacggttataaatatgccataggaagtcttaacgaaggtagaattggaattgctgcccagatgctaggactggcccaaggatgttttgactacactattccatacataaaagaaaggatgcagttcggcaaacgaatatttgattttcaggggctccaacaccaagtggctcacgtggccacccagctggaagctgcgcggttgctgacgtacaacgctgctaggcttgtagaagccgggaggccatttataaaagaagcatctatggccaagtattatgcatcagaggtcgctgggctgacaacaagcaagtgcatcgagtggatgggaggggtcggctacaccaaagattaccctgtggagaaattcttccgcgatgcgaagatcggtacaatatatgaaggaacttccaacatccagctgaacaccattgcaaagcacatcgatgcagagtactgacgtct

SEQ ID NO: 540 - DNA, 436 bp, Homo sapiens
actttattttggactgtggtacggccaacaagaccactctgtatgcaaaagcccaacatggctgtaactggagatgaaactgatgaggagactgaccttgccccaagtcacatggctgctgccacaggtgacatgccaacttaccagatccgagctcctactactgctttgccacaaggtgtggtgatggctgcctcaccaggaagcctgcacagtccccagcaactagcagaagaagcaactcgcaagcgggagctgaggctgatgaaaaacagggaagctgctaaagaatgtcgacgtcgaaagaaagagtatgtcaagtgtcttgagagtcgagtcgcagtgctggaagttcagaacaagaagcttatagaggagcttgaaactttgaaagacatttgctctcccaaaacagattagtagaaatatttaacta

SEQ ID NO: 541 - DNA, 436 bp, Homo sapiens; identical to SEQ ID NO: 540

SEQ ID NO: 542 - DNA, 607 bp, Homo sapiens
ggatccgtatgaccatggaaacagttgaatcacagcaggatcgaagtgtaacacattctgtggcagagcatagctccttgcatatgcagactggccaaatttctgtccctactctagctcaggatgaggagactgaccttgccccaagtcacatggctgctgccacaggtgacatgccaacttaccagatccgagctcctactactgctttgccacaaggtgtggtgatggctgcctcaccagggagtctgtacagtccccagcaactagcagaagaagcaactcgaaagcgggagctgaggctgatgaaaaacagggaagctgcccgggagtgtcgcaggaagaagaaagaatatgtcaaatgtcttgaaaatcgtgtggctgtgcttgaaaatcaaaacaagaccctcattgaggaactcaaggccctcaaagacctttattgccataaagcagagtaactgtgtttgacttggacctggttgactgtgaactctaatcggggcaggcgatgcagcatcctcgtaatggccatatggacttgtagatgggtctcttaacccttgcttaagaatacagtctgctgtagagtgtgaattgggaattc

SEQ ID NO: 543 - DNA, 2130 bp, Homo sapiens
ttttctccgagttttctgaactctggctcatgatcgggcttactggatacgagaatcctggaggaccgtaccctgatttccatctacctctgactttgagcctttctaacccggggctcacgctgccaacacccgggccacctggtccgatcgtcttacttcattcaccagcgttgccaattgctgccctgtccccagccccaatgggggagtgagagaggccactgccggccggacatgggtctccccatcgtgcctggcctgctgctgtcactggtgctcctggctctgctgatggggatacacccatcaggggtcaccggactggttccttctcttggtgaccgggagaagagggataatttgtgtccccagggaaagtatgcccatccaaagaataattccatctgctgcaccaagtgccacaaaggaacctacttggtgagtgactgtccaagcccagggcaggaaacagtctgcgaggtgtgtgataaaggcacctttacagcttcgcagaaccacgtcagacagtgtctcagttgcaagacatgtcggaaagaaatgttccaggtggagatttctccttgcaaagctgacatggacaccgtgtgtggctgcaagaagaaccaattccagcgctacctgagtgagacgcatttccagtgtgtggactgcagcccctgcttcaatggcaccgtgacaatcccctgtaaggagaaacagaacaccgtgtgtaactgccacgcaggattctttctaagcggaaatgagtgcaccccttgcagccactgcaagaaaaatcaggaatgtatgaagctgtgcctacctccagttgcaaatgtcacaaacccccaggactcaggtactgccgtgctgttgcctctggttatcttcctaggtctttgccttttattctttatctgcatcagtctactgtgccgatatccccagtggaggcccagggtctactccatcatttgtagggattcagctcctgtcaaagaggtggagggtgaaggaattgttactaagcccctaactccagcctctatcccagccttcagccccaaccccggcttcaaccccactctgggcttcagcaccaccccacgcttcagtcatcctgtctccagtacccccatcagccccgtcttcggtcctagtaactggcacaacttcgtgccacctgtaagagaggtggtcccaacccagggtgctgaccctctcctctacggatccctcaaccctgtgccaatccccgcccctgttcggaaatgggaagacgtcgtcgcggcccagccacaacggcttgacactgcagaccctgcgatgctgtatgctgtggtggatggcgtgcctccgacacgctggaaggagttcatgcggctcctggggctgagcgagcacgagatcgagcggctggagctgcagaacgggcgttgcctccgcgaggctcattacagcatgctggaagcctggcggcgccgcacaccgcgacacgaggccacgctggacgtagtgggccgcgtgctttgcgacatgaacctgcgtggctgcctggagaacatccgcgagactctagaaagccctgcccactcgtccacgacccacctcccgcgataaggccacacccccacctcaggaacgggactcgaaggaccatcctgctagatgccctgcttccctgtgaacctcctctttggtcctctagggggcaggctcgatctggcaggctcgatctggcagccacttccttggtgctaccgacttggtgtacatagcttttcccagctgccgaggacagcctgtgccagccacttgtgcatggcagggaagtgtgccatctgctcccagacagctgagggtgccaaaagccaggagaggtgattgtggagaaaaagcacaatctatctgatacccacttgggatgcaaggacccaaacaaagcttctcagggcctcctcagttgatttctgggcccttttcacagtagataaaacagtctttgtattgattatatcacactaatggatgaacggttgaactccctaaggtaggggcaagcacagaacagtggggtctccagctggagcccccgactcttgtaaatacactaaaaatctaaaagtg

SEQ ID NO: 544 - DNA, 2328 bp, Homo sapiens
cacaaccccttctttttccgttcttggaaaatggtgtccaagctcacgtctctccagcaagaactcctgagtgccctgctgagctccggagtcaccaaggaagtgctgatccaggccttggaggaattactgccgtccccgaatttcggggtgaagctggagacactgcccctgtcccccgggagcggggcggatctcgacaccaagccggttttccatactctcaccaatggccacgccaagggccgcttgtctggggacgagggctcagaggacggcgacgactatgacactcctcccatcctcaaagagctccaggcgctcaacaccgaggaggccgcggagcagcgggccgaggtggaccggatgctcagtgaggacccatggagggccgccaaaatgatcaagggatacatgcaacagcacaacatcccccagagggaggtggttgatgtcacaggcctgaaccaatcccacctttctcaacacctcaacaagggcacccccatgaagacccagaagcgagctgccctgtacacctggtacgtcagaaagcaacgggagatcctccgacagttcaaccagacagtccagagctctggaaacatgacagacaaaagcagtcaggatcagctgctatttctctttccagagttcagtcaacagaaccagggccctgggcagtcggaggacgcctgctctgagcccaccaacaagaagatgcgccgcaaccggttcaaatgggggcccgcatcccagcaaattttgtaccaggcctacgaccggcaaaagaatcccagcaaggaagagagggaggccttagtggaggagtgtaacagggcagaatgtttgcaacgaggggtctccccctccaaagcccatggcctaggctccaacttggtcacggaggtccgtgtctacaactggtttgcaaaccgccggaaggaagaggcattcagacagaagctggccatggatgcctatagctccaaccagacgcacaacctgaaccccctgctcacccatggctcccctcaccaccagccaagctcctctccacccaacaagttgtcaggagtgcgctacagccaaccgggaaacaatgaggtcacttcctcttcgacaatcagtcaccatggtaacagtgccatggtgaccagccagtcagttttacaacaagtctccccggccagcctggacccaggccacagtctcctctcacctgacagtaaaatgatctcggtgtctggaggaggactgcccccggtcagcaccttgacgaatatccacagcctctcccaccacaatccccagcaatctcaaaacctcatcatgactcccctgtccggagtcatggccattgcacagagcctcaacacctcccaagcccagggtgtcccagtcatcaacagtgtggctagcagcctggcagccctacagcccgtccagttctctcaacagctgcacagccctcaccagcagcccctcatgcagcagagcccaggcagtcacatggcccagcagcccttcatggctgcggtgactcagctacagaactcccacatgtatgcacataagcaggagccccctcagtattcccacacctcccggttcccatctgcaatggtggtcacagataccagtagcatcaataccctcaccagcatgtcttccagtaaacagtgtccactgcaagcctggtgatacccacataaccactcactttgtgcacagcaacgaggaccccattttccacaccatcagtttctgggcatctgtcatagagaagtccagcgacctgacaggcacctgggaagccaggagagatccctgcttacctgacatctgccggggacctccgacaagcccaagccactctcaggaggtgcagcccgaagcccagcttctcttctttgcagtattgtcgtaatgcctctcccaagatgccaagtgcccttgtttctcccagaggtggccggtgcaaaatggtgcaacaggaatcgagaagcccatggagtttccactgcaatccgtcattgaacaaactgatgcaaaaacttgaatctgttactgaaataagatgaggaccgaggagggtgtgtgctactgaactgagccagacactgtaaataactgacagacccccctctcccatcccagtgtctcaagatttcttctaaagaagtaaatttgtcaatgggtgtaaactatcaactactgtattaagtgcaatttttccttccacagatatctacccctgcccgatataatactaaagtgtctatcacttttcttgtaaaggtagagttaaattccaaaaaaaaaaaa

SEQ ID NO: 545 - DNA, 1417 bp, Homo sapiens
gtcctgctctcaaccgcagcctgcgccctaccttctgcagctccagcctactcctgaccgacagcatcatggctctcagaggcaccgtgactgacttctctggattcgacggcagggctgatgccgaagttcttcggaaggccatgaaaggcttgggcaccgacgaggacagcatcctgaacctgttgacagcccggagcaacgctcagcgccagcagattgctgaggagtttaagactctgtttggcagggaccttgtgaatgacatgaagtctgaactgaccggaaagtttgagaagttaattgtggctttgatgaagccctcccggctctacgacgcctacgagctgaaacacgctcttaagggagctgggacagatgagaaagtgttgactgaaatcattgcctcaaggacacctgaagagctcagggccataaaacaagcttatgaagaagaatatggttccaacctggaagatgatgtggtgggggatacctcagggtactaccagaggatgttggtggtcctccttcaggccaatagagaccctgacactgcaattgatgatgctcaagttgaactggatgctcaggcattgttccaggctggagagctgaagtgggggacggatgaagaaaagttcatcaccatccttgggacacgcagtgtgtctcatttaagaagagtgtttgacaagtacatgacaatatcaggatttcagattgaggaaaccattgaccgagagacctcagggaacttggagaacttactcctggctgtcgtgaagtctattcggagcatacctgcctaccttgcagagaccctctactatgctatgaagggtgctgggacggacgatcacaccctcatcagagtcatagtgtcgaggagtgagattgatctgtttaacatcaggaaggagtttaggaagaacttcgccacgtccctgtactctatgatcaagggcgacacatctggagactataagaaggccctgctgctcctctgtggaggcgaggatgactgaggagctgcctggagtgccctgggcccgcctgctgcccaccatcagcttccttcagcaccacgcctacttacgttcaatgcctgcctgcctgccacgctgccttactcacacgagtgtgtgctaatgaccaaagctgtctcgaatgaaagcagtgttctgctgttctgtctgacagaccttcccacgtctctcagtctagtatctctaagttgcgttttctatcctcttctaaagcttcatttatattaagttaataaccatattaccttgaacggaaccttagccatgaaattgtgaactcttggaagtgctgtcaatcaagcttagtgctctagctgacctgaaaaattaagatggtcgtaatatcagaaacgttgccgacaaataaa

SEQ ID NO: 546 - DNA, 4319 bp, Homo sapiens
cttggtggcctccattgagatccggaggatccaaggactgtgtagctacaatgttgtcaagacttttccgtatgcatggcctctttgtggcctcccatccctgggaggtaattgtgggaacggtgacacttactatctgtatgatgtccatgaacatgttcaccggcaacaacaagatctgtggttggaattatgagtgcccaaaatttgaagaggacgtgctgagcagcgacatcatcatcctcacgataacccggtgcatcgccatcctgtacatctacttccagttccagaacctgcgtcagcttgggtcaaagtacattttgggtattgccggcctcttcacaattttctcaagtttcgtcttcagcactgtcgtcattcatttcctcgacaaagaattgacaggcttaaatgaagctttgcccttttttctgctcttgattgacctttctagagcgagtgcattggccaagtttgccctgagttcaaactcacaggatgaagtaagggagaatatagcgcgtgggatggcgatcctgggccccacgttcacccttgacgctctggtggaatgtcttgtgattggagttggcaccatgtcaggggtgcggcagcttgagatcatgtgctgctttggctgtatgtccgtgcttgccaactactttgtcttcatgacattcttcccagcctgcgtgtccctggtcctagagctttctcgggaaagccgtgagggtcgtccaatttggcagctcagccattttgccagagttttagaagaagaagagaataaaccaaacccagtaacccaaagggtcaagatgatcatgtctttaggcctggttcttgttcacgctcacagtcgctggatagctgatccttctcctcagaacagcacagcagaacagtctaaggtttccttgggtctggctgaagatgtgtccaagagaattgagccgagtgtttctctctggcagttttacctctccaagatgatcagcatggacatcgagcaagtgattaccctgagcttagcgttgcttttggctgtcaagtatattttctttgaacaagcagagacagaatcaacactctcattaaaaaatcctatcacatctcctgtcgtgaccccaaagaaagctcaagacaactgttgtagacgtgagcctctgcttgtgaggaggaaccagaagctttcgtcagtggaggaggatccaggagtgaaccaagacagaaaagttgaggttataaaacctttagtggcagaagccgagacttcgggcagagctacgtttgtgcttggcgcctctgcagccagccctccattggccctgggggcacaggagcctgggatcgaactccccagcgagcctcgacctaatgaagagtgtctacagatactggagagtgcagagaaaggtgcgaagttccttagtgatgcagagatcatccagttggtcaatgctaagcacatcccagcctacaaactggaaaccctcatggagacgcacgagcgtggtgtgtctattcgccggcagctcctctccgccaagcttgcagagccatcttctctgcagtacctgccttacagagactataattactccttggtgatgggagcttgctgtgagaacgtgatcggatatatgcccatccctgttggagtggcaggacctctgtgcctggatggaaaagagtaccaggtgccaatggcaacaacagaaggttgtcttgtggccagcacgaacagaggctgcagagcgatcagtcttggtggaggtgccagcagccgggtccttgcagatgggatgagccgaggcccagtggtgcgtcttcctcgtgcttgtgactcagcagaggtgaagagctggcttgaaacacctgaagggtttgcagtggtaaaggaggccttcgacagcacgagcagatttgcacgtctacagaaacttcacgtgacgctggcaggacgcaacctctacatccgtctccagtccaaaacgggggacgccatggggatgaacatgatttccaagggtacggagaaagcacttctgaagcttcaagagttctttcctgagctgcagattctggcggtcagtggtaactattgcaccgacaagaaacctgctgccataaactggatcgaagggagaggaaagactgtggtttgtgaagctgtcattccagccaaggtggtgagagaagtattaaagacgactacggaagctatggttgacgtaaacattaacaagaatcttgtgggctctgccatggctggtagcataggaggctacaacgcccatgctgccaacatcgtcactgccatctacattgcatgtggccaggatgcagcacagaatgtggggagttcaaactgtattacgttaatggaagcaagtggtcccacaaatgaagacttatacatcagctgtaccatgccgtctatagagatcggaaccgtgggtggtgggaccaaccttctacctcagcaagcctgcctgcagatgctaggtgttcaaggggcgtgcaaagacaatcctggagaaaatgcacggcagcttgcccgaattgtgtgtggcactgtgatggctggtgagttgtccttgatggcagcattggcagcaggacatcttgtcagaagtcacatggttcacaacagatcaaagataaatttacaagatctgcagggaacatgcaccaagaaggcagcttgagcatcctgacatactggactgaaacacgggcattgggttctccaggactaacatgaaatctgtgaattaaaaatgtcagtgcagtgtcttgtggaagatgaacgtgatcagtgaggcaggcacctgcttggtttctggctctttagagacgtctgcggtcctttgcacagactcctcagacgtgggaactatggttctttccgtgccgtgttctagaaagatctcatgtggatgtcatggtgctctgagcaccacagatgtgactgcagctcgtttctgaaagctgccacaagctggaagctggtgttttgacgaaatgatggatcctggtgatcagtgtggggctcacctccaatgggttaaaatggagttttaaatgacactgtagctgacagaacttctgatttttatttattcagtctgggttgtagaactttgcaatctaagtttattttttgtaaactaataattcatttggtgctggtctattgatttttggggacctacttcttcatggaagaattacttttattctcaaactacagaataatgtgctaagtagtgctaaatagttctcgacgaagaaaagagtcgctgtgttcatctcagtctttgttcagagaggcctttagctgtgccacagtctgcactaaagacacagagctcttagtgttagagcagagtacaagcaggtcggacctctcaggacttagagtgtgggagcagtttttaaagaaaacaaccattgctctaagccaactttctttggagacattttaacttatttagctgaattctagatttcttggtaaactatcaaatctgtatatgttgtaataaagtgtctaatgctaggagtttattggaagtgtttaagaaataaaagtactcagcttttacacggataaaatgctctagcttgggccagagaagacctcgctcaggagcattggtccgggaaagcctggcttgcttgccgagcctaatgaagggaagtcagcctacagagccagtgatggagccacatgaatggccctggagctgtgtgccttgttcctgtggccaggagttgggtgactgaatcatttatgggctcctttggtggacccataaaagctcttagcttcctcagggggtcagcagagttgttgaatcttaatttttttttaatgtaccagttttgtataaataataataaagagctccttattttgtattctatctaatgcttcgtttggtcttggaagcggacgtctgtgtagaagacggactctgaaagacattccgagtgaggcggcggcggcggcggcggcacgggagctcagtgattgtgtcagtattattgtggaaggttgactttgctgttgtatgtaaagtttccagttgcgcctcttgtgacttttcagccagtaccattttatttacctgagcttgtcgtggaagtggtagtaaaccgcattgagtgttgatgctggtgactgtgatcagtgtcatcgtgctaagtccatgttttgtacaattactaaattgtatacattttgttatagaatactttttccagttgagtaaattatgaaaggaagttaacattaaaaaaaaaaaaaa

SEQ ID NO: 547 - DNA, 1386 bp, Homo sapiens
aattccgcggcgacctccggggatccgagtttgcagactacgtgtgtgcgcagctagccacctcaggtgtttgaaccatgacccctttactcctcctggctgtcctctgcttgggaacagccttagccactccaaaatttgatcaaacgtttaatgcacagtggcaccagtggaagtccacacacagaagactgtatggcacgaatgaggaagagtggaggagagcagtgtgggagaagaacatgaggatgatccagctacacaatggggagtacagcaacgggaagcacggctttaccatggagatgaacgccttcggtgacatgaccaatgaggaattcaggcagatagtgaatggctatcgccaccagaagcacaagaagggaaggttatttcaggaacctctgatgctgcagatccccaagactgtggactggagagaaaagggttgtgtgactcctgtgaagaatcagggccagtgtggttcttgctgggcttttagcgcatcgggttgcctagaaggacagatgttccttaagactggcaaactgatctcactgagtgaacagaaccttgtggactgttctcacgatcaaggcaatcagggctgtaatggaggcctgatggattttgctttccagtacattaaggaaaatggaggtctggactcagaggagtcttatccctatgaagcaaaggatggatcttgtaaatacagagctgagtatgctgtggctaacgacacagggtttgtggatatccctcagcaagagaaagccctcatgaagcctgtagcgacggtggggcctatttctgttgccatggatgcaagccatccgtctctccagttctatagttcaggtatctactatgaacccaactgtagcagcaaggacctcgaccatggggttctggtggttggctatggttatgaaggaacagattcaaataaggataaatactggcttgtcaaaaacagctggggtaaagaatggggtatggatggctacatcaaaatagccaaagaccggaacaaccactgcggacttgccaccgcagccagctatcctatcgtgaattgatggacagcgataataaggactgacggacactacatccgaaggagttcatcttaaaactgaccaaacccgtctctgagtgagaccatggtacttgaatcgttcaggatccaagtcacgatttaaattctgttgacatttttacatgggttaaatgttaccactacttaaaactcctgttataaacagctttataatattggacacttaatgcttaattctgattctggaatatttgttttataaaagttgtataaaactttctttaccttttaaaaataaattttagctcagtgcaaaaaaaaaa

SEQ ID NO: 548 - DNA, 6060 bp, Homo sapiens
tcctggctataagtcaccatggcccagcaggctgcagacaagtacctctatgtggataaaaacttcatcaataacccgctggcccaggccgactgcggtgccaagaagctggtatgggtgccttccaccaagaatggctttgaaccagccagccttaaggaggaggtgggagaagaggccattgtggagctggtggagaatgggaagaaggtgaaggtgaacaaggatgatatccagaagatgaacccacccaagttctccaaggtggaggacatggcagagctcacgtgcctcaacgaagcctcggtgctgcacaacctcaaggagcgatactactcagggctcatctatacctattcaggcctgttctgtgtggtcattaatccttataagaacctgcctatctactcagaggagatcgtggacatgtacaagggcaagaagaggcacgagatgccgccccacatctatgccatcacagacactgcctacaggagcatgatgcaggaccgagaagatcagtccatcctttgcacgggtgagtctggagcaggcaagacagagaacaccaagaaagtcattcagtacctggcacatgtggcctcctcacacaagagcaagaaggaccagggggagctggagcgccaactgctgcaggccaaccctatcctagaggcctttggaaacgccaagacggtgaagaatgacaactcttcacgatttggtaaattcattcgtatcaactttgatgtcaacggctacatcgttggggccaacattgagacttatcttctggagaaatctcgtgctatccgccaagccaaggaggaaagaaccttccacattttttactacctgctgtctggggccggagagcacctgaagactgatctcctgttggagccatacaataaataccgcttcctgtccaacgggcatgtcaccatcccagggcagcaggacaaggacatgttccaggagacaatggaggccatgaggattatgggtatcccagaggatgagcagatgggcttgctgcgggtcatctctggcgtccttcagcttggcaacattgtcttcaagaaggaacggaacactgaccaggcgtccatgccagataacacagctgctcaaaaggtgtcccacctcctggggatcaatgtgaccgacttcaccagaggcatccttaccccgcgcatcaaggtgggcagagactatgtgcagaaggcacagactaaagagcaggctgactttgccatcgaggctttggccaaggctacctacgagcggatgttccgctggctggtgcttcgcattaacaaagctctggacaagaccaagaggcagggcgcctcatttatcgggatcctggacatcgctggcttcgagatctttgatctgaactccttcgagcaactttgcatcaactataccaacgagaagctgcagcagctgttcaaccacaccatgttcatcctggagcaggaggagtaccagcgagagggcatcgagtggaacttcatcgactttggccttgacctgcagccttgcatcgacctcattgagaagccggcgggtcccccaggcatcctggccctgttagatgaggaatgttggttccctaaagccactgacaagagcttcgtggagaaggtggtgcaggagcagggcacccaccccaagttccagaagcccaagcaactgaaggacaaggctgatttctgcatcatccactatgcaggcaaggtggactataaggccgatgagtggctgatgaagaacatggaccctctgaacgacaacattgccaccctgcttcaccagtcctcagacaagtttgtctctgagctgtggaaggatgtggatcgaatcattggcttggaccaggtggctggaatgtctgagacagcgctacccggtgccttcaagactcggaagggcatgttccgtactgtggggcagctgtacaaggagcagctggccaagctcatggccacactgaggaataccaaccccaactttgtctgctgcatcattcccaaccacgagaagaaggccggcaaactggacccacacctggtgctggaccagttacgctgcaatggcgtccttgaaggcatccgaatctgccgccagggctttcccaacagagtggtcttccaggagttccggcagaggtatgagatcctcacacctaactccattccgaagggcttcatggatgggaagcaggcgtgtgtgctcatgatcaaagccttggagcttgacagcaacctgtaccgcatcggccagagcaaagtgttcttccgttccggagtcctagctcacctggaggaagagcgggacctgaagatcactgatgtcatcattggcttccaggcctgctgcagaggctacctggccaggaaggcctttgccaagaggcagcagcagctgactgccatgaaggtcctacagaggaactgtgctgcatacctcagactccggaactggcagtggtggaggctcttcaccaaggtcaagcccctgctgaactcaataaggcatgaggatgagcttttagccaaggaggcggaactgacaaaagttcgagagaagcatctggctgcagagaacaggctgacagagatggagactatgcagtctcagctcatggcagagaagttgcagcttcaggagcagctgcaggcgaaaaccgagttgtgtgctgaggctgaggagctccgggcccgcctgacagcgaagaagcaggagttggaggagatctgccatgacctggaggccagggtagaggaggaggaggagcgctgccagtatctgcaggcagagaagaagaagatgcagcagaacatccaggaactcgaggagcagctggaggaggaggagagtgcccggcagaagctgcagcttgagaaggtgaccactgaggccaagctgaagaaactggaggaggaccagatcatcatggaggatcaaaactgcaaactggccaaggagaagaagctgctggaagacagagtagctgaatttactacagacctcatggaagaggaggagaagtccaagagcctggccaagctcaagaacaagcatgaggcgatgatcaccgacctggaagagcgccttcgtagggaggagaagcaaaggcaggagttggagaagacccgccgcaagctagagggagactccacagacctcagcgaccagattgctgagctccaggcgcagatcgcagagctcaagatgcagctggccaagaaggaggaggaattgcaggctgccttggccagagtggaagaagaagctgctcagaagaacatggccctgaagaagattcgagaactggaaactcagatctctgagctgcaggaagacctggagtcggagcgtgcctgcaggaacaaagctgagaagcagaaacgggatcttggagaagagctagaggctctgaagacagagctggaggacactctggactccaccgctgcccagcaggaactgaggtcaaagcgtgagcaggaagtgagcatcctgaagaagactcttgaggatgaggccaagacccatgaggcccagatccaggagatgaggcagaagcactcgcaggccgtggaggagctggccgagcaattggagcagactaagcgggtaaaagctacccttgagaaggctaagcagaccctggagaatgagcggggagagctggccaatgaggtgaaggccttgctgcagggcaagggcgactcggagcacaagcgcaagaaggtggaggcgcagctgcaagaactgcaggtcaagttcagcgagggagagcgtgtacggaccgagctggctgacaaggtctccaagctgcaggttgaactggacagcgtgaccggtctccttaaccagtcggacagcaagtccagcaagcttacaaaggacttctctgcgctggagtcccagctccaggacacacaggagctgctccaggaggagaaccggcagaagctgagcctcagcaccaagctcaagcagatggaggatgagaaaaactccttcagagagcagctggaggaggaagaggaggaggccaagcgcaacctggagaagcagatcgccaccctccatgcccaggtgactgatatgaagaagaagatggaggacggtgtagggtgcctggagacagcagaggaggcaaagcggaggcttcagaaggacctggaaggcctgagccagcggcttgaggagaaggtggctgcctatgataagctggagaagaccaagacccggcttcagcaggagctggatgacctgctggtggacctggaccaccagcggcagagcgtctccaacctggaaaagaagcagaagaagtttgaccagctcctagctgaggagaagaccatctcagccaagtatgctgaggagcgagaccgagctgaagctgaggcccgtgagaaggagacaaaggcactgtcactggcccgagcacttgaggaggccatggagcagaaggcagagctagaacggctcaacaagcagttccgcacggagatggaggacctcatgagctccaaggatgacgtgggcaagagtgtccatgagctggagaagtccaacagggcattggagcagcaggtcgaggagatgaagacccagctggaggagctggaggatgagcttcaggccactgaggatgccaagctccgtctggaggtgaacctgcaggccatgaaggcccagtttgagcgggatctgcagggccgggatgaacagagcgaggagaagaagaagcagctggtcagacaggtgcgggagatggaggcggagctggaggatgagaggaagcagcggtccattgccatggctgctcgcaagaaactagagatggatctgaaggacctggaggctcacatagacacagccaacaagaaccgggaggaggccatcaaacagctacggaagcttcaggcccagatgaaggactgcatgcgggacgtggacgacacgcgagcctcccgggaggagatcctggcccaggccaaggagaatgagaagaagctcaagagcatggaggccgagatgattcagctgcaggaggaactggcagccgccgagcgtgctaaacgccaggcccagcaggagcgggatgagctggccgatgagatcgccaacagcagtggcaaaggggccctagcattggaggagaagcggcgactagaggccctcattgccctgctggaggaagagctggaggaggagcagggcaacacagaactgatcaacgaccggctgaagaaggccaatctgcagatcgaccaaataaacaccgacctgaacctggagcgcagccacgcccagaagaacgagaatgcgcggcagcagctggaacgccagaacaaggagctcaaggccaagctgcaggagatggagagtgctgtcaagtccaaatacaaggcctccatcgctgccttggaggccaagattgcacagctggaggagcagctggacaacgagaccaaggagcgccaggcagcctccaagcaggtgcgccgggcggagaagaagctgaaggatgtgctgctgcaagtggaagacgagcggaggaacgcggagcagttcaaggaccaggccgacaaggcatccactcgcctgaagcagcttaagcggcagctagaggaggccgaggaggaggcccagcgggccaatgcctcccgccggaagctgcagcgtgagctggaggatgccacagagactgccgatgctatgaaccgagaggtcagctccctgaagaacaaactgaggcgtggggacatgccatttgttgtgacccgccgaattgtccggaaaggcactggcgactgctcagacgaggaggtcgacggtaaagcagacggggctgatgccaaggcgaccgagtagggacttctgctacccaagacggatggacagacggctccacctcccttccccagccctccacacccctgccttgagactgctctgcccatgcccctcttcctcccaggccttcttgagggcattggcttcctctgctgcatccccttccagctccct

SEQ ID NO: 549 - DNA, 5957 bp, Homo sapiens
cttgcacactgccgtggtttggaagaagcgaacactgaagacgctactgttgttaatgaccatcttcctgctgtcagggtaacctggtccctgacataaggagaccccaggcagggaacgtctccctagagggcagttccccttctggaaggcagaaagcgagcggctgaacgcccgggacacgcagcgggaccgggacagcatcgcggagccagcgggatggagggcgggaggacgcgcggcggctgcggcggcggcggtggtggtggtgaggcggcctgaggtgttccggcccagcgggtcgcggagaggagccgccgcgatcatgtcggcgggcggccgcgacgaagagcggcggaagctggccgacatcattcaccactggaacgccaaccggctggacctgttcgagatcagccagccgaccgaggatttggagtttcatggagtcatgagattttattttcaagataaagctgctggaaactttgcaacaaaatgtattcgggtctctagcacagcaaccactcaagatgtcattgaaacactggcagagaagttccgccctgatatgcgcatgctctcctctcccaagtactccctctatgaagtgcatgtcagtggagaaagaagattggacattgatgagaaacctctagttgtacagttgaattggaacaaagatgatcgggagggtagattcgtccttaagaacgagaatgacgccattcctgccaagaaggctcagagtaatggacctgagaagcaggagaaagaaggtgttattcagaacttcaaaagaactctgtcaaagaaagaaaagaaggaaaaaaagaagagagagaaggaggctttgagacaagcctctgataaggaagaaaggccttctcaaggggatgacagtgagaattctcgtctggctgctgaagtttacaaagacatgcctgaaaccagctttactcgaacgatttctaatcctgaagttgttatgaaacggcggcggcagcaaaaactggagaagagaatgcaagagtttcggagctcagatgggcggcccgactcgggtggaacactgagaatctatgcagacagtttaaaaccaaatattccatacaagacaatcctgctgtctactacagatcctgcagactttgctgtagcagagtccttagagaagtatggtctggaaaaagagaaccccaaggactactgcattgctcgggttatgcttcctcctggagcccagcattctgatgagagaggtgctaaggaaataattcttgatgacgatgaatgccctttacaaatcttcagggaatggccaagtgacaaagggattttagtctttcagttgaagaggagaccaccggactacattccaaagaaaatgaagaaacatgttgaaggcaagccattgaaggggaaagatagagctgacgggtctggctacggctctgctcttcctcctgagaagctgccctacttagtagagctcagcccagggagaaggaatcactttgcctactacagctatcacacttacgaagatggctctgactccagagacaagccaaagttataccgccttcagttaagtgtgactgaagttgggacagagaagttcgatgacaattctattcagctgtttggtcctggaattcagccccatcactgtgatctcaccaacatggatggagtggtcactgtgacacccagaagtatggatgcagagacctatgtggatggtcagcgcatctcagagaccacaatgctacagagtggcatgagactgcagtttggcacctcgcatgtgtttaagtttgtggaccccatccaggaccacgttctttccaagagatctgtggatggaggcctgatggtcaagggcccaagacataaacctggagccgttcaagagacaacctttgaattgggaggagatatccacagtgggacagcattgccggcaagcaggagcactactagattggacagtgacagggtgtcctctgcctctagcacagctgagcgagggatggtgaagccaatgatccgactggaccaggagcaggactaccggcgaagagaaagcaggactcaggatgctgctgggcctgaactgatgctgcctgccagcattgaattccgggaaagctctgaagactcttttttatctgccattataaactataccaatagctctacagttcattttaagttgtcacctacatatgtgttatacatggcatgccggtatgtattgtccagccagcacaggcccgacatcagtcctacagagcggacacataaggccattgctgttgtgaacaagatggtgagcatgatggaaggggtcatccaggaagtagaccaggttgatcagaaacagaagaacattgcaggagcacttgctttctggatggcaaatgcatctgagcttctcaacttcatcaagcaggaccgagaccttagtcggattactctggatgcccaggatgttctagcacacttggttcagatggcatttaagtacttggttcactgccttcagtcagaacttaataactacatgccagcctttctggatgatcccgaggagaacagtctgcagagaccaaaaatagatgatgtgctgcatacgctcacaggagccatgtccttgttgcggcgctgcagagtcaatgccgccttgaccatccagctgttctctcagcttttccacttcatcaatatgtggctattcaacagactggtgactgacccagattcaggcctgtgttcccactactggggcgcaattatccgccagcagctggggcatattgaagcttgggcagagaagcagggactagagttggcagctgactgtcacttgagcaggatcgtgcaggctactacgttgcttacaatggataagtatgtacctgatgacattccaaatataaacagcacatgctttaagttaaattctctgcagcttcaagccctcttacagaattaccactgtgcacctgatgagccttttattcctacggatctcatagaaaatgtcgtggctgttgctgagaacacagctgatgagcttgcccgcagtgatggcagagatgtgcagttagaggaggaccctgatctacaactgccctttcttctgccagaagatggctattcctgtgatgttgtcagaaacattccaaatggtttacaagaatttttagaccctctgtgccagagaggattttgcaggttggttcctcacacacgttctccaggtacctggacaatatattttgaaggagcagattatgaaagtcacctcatgcgtgagaacacagaactgacccagcctctgaggaaggagcctgaggtaatcactgtgaccctgaagaagcagaatggaatgggcctcagcattgttgcagcaaagggtgctggccaggataaactgggaatctacgttaagtccgttgtcaaaggaggtgctgcagatgtggatggacgcctagctgctggtgaccaactccttagtgtggatggacgaagtctggttggactttctcaggaaagggcagcagaactcatgacaagaaccagttccgtggtaacactggaagttgcaaagcaaggcgctatctatcacggactggccactctccttaaccagccatcacccatgatgcagagaatttcagatcgtcgtggctcaggtaaacccagaccaaagagcgaaggttttgagctctataataattcagctcaaaacggctccccagagagtcctcagatgccttggacagagtacagtgagccaaagaagctgcctggtgacgacaggctgatgaaaaacagagctgaccaccgttccagccccaatgtggcaaatcagccccctagtcctggagggaagagtccatatacctctggaacagcagctaaaataacatctgtctctactggaaacctctgcactgaggagcagacccctccacctagacctgaagcctatcctatccctactcagacatataccagagagtattttacctttccagcttcaaagtcgcaggatcggatggctcctgttcaaaaccagtggccaaattatgaggaaaaaccacacatgcacacagaaagtgatcatgccagtattgcaatccagcgtgttacccgttcccaggaagagcttcgggaagagaaggtttaccaacttgagcgtcatcgagtagagtcaggcatggatcgcaagtgtgacagtgatatgtggatcaatcagagctcctcagtggaatctagcacgtctagccaggagcacctgaaccattcctccaagtcagttacccctgcttccactctgaccaagagtggtcctggtcgttggaaaaccccagcagctgtgctccccacccctgtggctgtctcccaacccattcgaacagacctccctccaccaccacctccaccacctgcccactacaccagtgattttgatggtatttcaatggatttgcccctcccacctcctcctgccaaccaagcagctccccagtctgctcaggtggctgctgcagagaggaaaaagagagaggagcatcagaggtggtatgaaaaagagaaggcccgcctggaggaggaacgagagagaaagcgcagggagcaagagaggaagttggggcagatgcgcactcagtccctgaaccctgcttccttctctcctttggccacacaggccaagccagaaaagccttccacactgcagaggccccaagaaacggtcattcgggagctgcagccccagcagcagccccgtactattgagcgcagggatctgcagtacataaccatcagtaaagaggagctgtcctctggggatagtctgtctccagacccatggaaacgagatgccagggagaagctggagaagcaacagcaaatgcacattgtagacatgctaagcaaggagatccatgagctgcaaaacaagggggaccgtactgcagaggagagtgaccgcctgcggaagcttatgctggagtggcagttccagaagagactacaggagtccaagcagaaggatgaggatgatgatgaagaggaagatgatgatgttgacaccatgctgatcatgcagcgactggaggcggagcggagagccaggttgcaggatgaagagcgcaggcgccagcaacagttggaagagatgcgcaaacgagaagttgaagacagagtaagacaagaggaagatggacgccatcaggaggaggagcgagtaaagagagatgctgaagaaaagaggcgacaggaagaagggtattacagccgcctagaagctgagaggcgcagacagcatgaagaggcagcacgcaggttgctggagcccgaagaacccgggctgagccgacctccacttccacaggactacgagcccccatcccagtcctcagcacccagtgcccctcctcccccacctcagcgaaatgcctcctacctcaaaacacaggtcctctccccagactcgctgttcactgccaagtttgttgcgtatgatgatgatgatgaggaggagaactacgtcccagcaggaccaaactcttattcgggatctgctggcacaactgctggaacttatgatgctcctcgggacacaagagaaaaactcagtagaagccaagatgcagacttacctggcagttctggagcccctgaaaacctgacatttagagagcgtcagcgcctcttttcacaaggtcaagatgtgtcagacaaagtgaaagcttctcgtaaattaacagagcttgagaatgaactcaacaccaagtgagaagagagaggtcacctgtactcaagcaggtctgaccttggcagtggatttgtggggtgggcctgaagaggaaggaacaattgtacttctaagtgatgtttaatttctttctgaaatggttgcaattgagagatgttccaaa

SEQ ID NO: 550 - DNA, 5957 bp, Homo sapiens; identical to SEQ ID NO: 549

SEQ ID NO: 551 - DNA, 1866 bp, Homo sapiens
agagccaacagagcaggaaggcatcatggcagcagcgctccgcagaggctacaaggtcctgagaagtgtctctcattttgagtgtcgagcacaacacacaaaaccatctctcaagcaggagccgggactagggtttagcttcgagttgacggagcagcagaaagagtttcaaacaattgctcggaagtttgccagagaggaaataatcccggtcgccccagactacgataaaagcggggaatacccgttccctctcatcaagagagcctgggaacttgggttgatcaacacacacattccggagagttgtggtggtcttggcctgggaacttttgatgcgtgtttaattacggaagagttggcatatgggtgtacaggggtgcagactgctattgaagcaaattctttggggcaaatgcctgtgattattgctggaaatgatcaacagaagaagaagtatttggggaggatgacggagcagccgatgatgtgtgcctactgcgtgacagaaccctcagcaggctctgatgtggcgggcattaagaccaaagcagagaagaagggtgatgaatatgtcatcaatggccagaagatgtggataaccaacgggggaaaggccaactggtattttgtattgacgcgatctaacccagatcctaaagtacctgctagtaaagccttcaccggattcatcgtggaggccgacaccccgggaatacacatcggaaaaaaggaactaaacatgggtcagcggtgctctgacaccagaggaatcaccttcgaagatgtcagagtgcctaaggaaaatgtgttaattggtgaaggagcaggtttcaagattgcaatgggggcttttgatagaaccaggccgacggtcgcagctggtgctgtcgggctagcccagagagccctggacgaagctactaagtatgccctggacaggaaaacatttggaaagctgctagtggagcaccaaggagtttcatttctgctcgcagaaatggcgatgaaagttgaactggccagactcagttaccagcgagcagcctgggaggttgactccggccgccggaacacgtactttgcctctattgcgaaggcctttgctggagatattgccaaccagctcgctaccgatgctgtgcagattttcggaggctatggattcaacactgagtacccagtagaaaagctgatgcgggacgccaagatctatcagatttacgaaggtactgcacaaattcagaggctgatcatagctcgtgagcacattgaaaagtataaaaattaacagaaattactatcgaacgatgcttcaccctcatgtaactacgctcagagcactgttgctgcttcagggggaaagggctttacttgtcttcccacagaaatgagataaaagacgcgtgtcacagatctgtgcaatggggtcccacggcggagggtgcctctgttgagttccacagtgaccctttctagataggtttggttttggacagtgagtggtcagtccttggccccgaattgtgttaatttgctccttgatcacttgagatggagaaataccctggagttctaatgctcattcaagtgacaagaaaggtagcctgtcacgaaagaactcaggattctacacagacactgaggaatgtggcggattggacccatcacactgtgaagagagagcatttctgtgctgagctgtttcataattttgattatatttcccttgtattgcagaagagtaaaaaagtttatatgcattttctcccattataaaactaaaaactttctggaaaatcttaattctgaactggcattttatttgtcttgattacaatgattcaataaagctagccttaactt

SEQ ID NO: 552 - DNA, 2208 bp, Homo sapiens
atgaatggtgacacgcgggccgcagtggtgacctcaccacctccaaccacagcccctcacaaggagaggtactttgacagagtcgatgagaacaatccagaatatttgcgggagaggaacatggcaccagaccttcgtcaggacttcaatatgatggagcagaagaagagggtgtctatgattctgcagagtcccgccttctgtgaagagctggagtctatgatacaggagcagtttaagaaggggaagaaccctacaggcctgttggcattacagcagattgcggatttcatgacggcgagtgtgcccaatgtctacccggcagctccacaaggaggaatggccgccctgaacatgagtcttggtatggttactcctgtgaatgaccttagaggatctgattctattgcatatgacaagggggagaagttactgcgatgtaagctggcagcattttacagactagcagacctctttggctggtctcagcttatctacaatcacatcacaaccagagtgaactctgagcaggagcacttcctcatcgtgcctttcggacttctctacagtgaagtgactgcgtccagcctggttaaggtcaatctacaaggagacatagtagaccgcggaagtactaacctgggagtcaaccaggccggcttcaccttgcactcggccatttatgctgcacgaccagatgccaagtgcattgtgcacattcacacaccagcaggggctgcggtctctgcaatgaagtgtgggctcttgcctatttccccggaggcgctttcccttggagaggttgcttatcatgactatcatggcattctggttgatgaagaggaaaaaattttgattcagaagaatctgggccctaaaagcaaggttctcattctccggaatcacgggctcgtgtcagttggagagagtgtggaggaggccttcttttatatccacaaccttgtggttgcatgtgagatccaggttcgaactctggcaagtgctggaggaccagacaacttagttctgctggatcctgggaagtacaaagccaaatcccgttctccagggactccagcaggggaaggctctggatcacctcccaagtggcagattggggagcaggaatttgaagctcttatgcggatgctcgataatctgggctacagaactggctacccctatcgataccctgctctgagagagagatctaaaaagtacagcgatgtggaagtccctgccagtgtcaccggccactcctttgctagtgacggcgattcgggcacttgctcgccgctcagacacagttttcagaagcagcagcgagagaagacaagatggctgaactctggccggggtgatgacgcttctgaggaggggcagaacggaagcagtcccaagtcgaagactaagtggactaaagaggatggacatagaacttccacctctgctgtccctaacctgtttgttccattgaacactaacccaaaagaggtccaggagatgaggaacaagatccgagagcagaacttacaggacattaagacggcaggacctcagtcgcaggttttgtgtggtgtgatgatggacagaagccttgtccagggggagctcgtgacggcctccaaagccatcattgagaaggaataccagcctcatgtaattgtgagcaccacaggtcccaaccccttcaacacgctcacagaccgtgaactagaggaataccgccgagaggtggagcggaagcagaagggctctgaagagaacctggacgagacaagagagcagaaagagaagagtcctccagaccagtcagctgttcccaacactccgcccagcactcccgtcaagcttgaaggaggccttccccaggagccgacatccagggatggcagcggatgccacgcctccaagccgactccccctgacctctcccctgatgagccttcagaagcacttgccttcccaacagtggcagaggaagcccatgcttccccagacaccactcagccccttgctgaggctgaccctgagccagcctcagcctcagctccaggagctgaagaggtagcctcccctgccactgaggaggggtctcccatggaccctggcagcgatgggtctccaggcaagtccccatccaagaagaagaagaagttccgcaccccgtccttcctgaagaagagcaagaagaagagtgactcctga

SEQ ID NO: 553 - DNA, 1091 bp, Homo sapiens
attcgcatttctagaaactgggaaatttcttaagattttaattctggcagctctttaattgtctctttgtggttgcaaatccactggatacactgtcttatttctgctattcttctctattacagggtagactttctttttcccatctgttacaggggaaatataattccttagaaggaagttgttttgatctgacgtctttagaggatgcttttgactgatatcagagtttaagtccatcgtgggtcaagtaactggtcaccaaatgctttgtttggttgtgtgctgtctgatatggttgatttctgccttagatgggagctgttcagaaccccctccggtgaacaatagtgtgtttgttggaaaggaaactgaagaacagattctgggaatttacctttgtatcaaaggctaccacttggtgggaaagaagtctttggtctttgatccctcgaaggaatggaattcgaccctccctgagtgcctcctgggccactgtcctgaccctgtactggaaaatggcaagatcaattcttctgggcctgtgaatataagtggcaaaatcatgtttgagtgtaatgatggttacatcctcaagggaagcaattggagccagtgcctagaggaccacacctgggcacctcccttgcccatctgccgaagtagagactgtgaacctcctgagactcctgtccatggctattttgaaggagaaactttcacttcaggatctgtcgttacttattactgtgaagatgggtaccacctagtgggcacacagaaggtgcagtgcagtgatggagagtggagcccgtcctatcctacctgtgagtccatccaggaaccccccaaatcagctgaacagagtgcacttgagaaagctattcttgcctttcaggagagtaaggacctttgcaatgctacagagaactttgtgagacagctaagggaaggtggaataacaatggaagaacttaaatgttctctggagatgaagaaaactaagctgaagtcggatattttactgaactaccatagctaagcagaatggttacagacagacacctatgaataaattgcttctaaaggtg

SEQ ID NO: 554 - DNA, 831 bp, Homo sapiens
agttgggagctgagtggagaagaagccacgattctcgctagacagtgaagcacagttgctgctatgtctgggaagccagtgcttcactacttcaatgcccggggcagaatggagtgcatccggtggctcctggctgcagcaggagtggagtttgatgagaagtttatacagagtccagaagacttggaaaagctaaagaaagacgggaatttgatgtttgaccaagtgcccatggtggagattgacgggatgaagctggcacagaccagagccattctcaactacatcgccaccaaatatgacctctatgggaaggacatgaaggagagagccctgattgacatgtacaccgaaggcattttagatctgactgaaatgattatgcaattggtaatatgtcccccagaccaaaaagaagccaagaccgccttggcaaaagacaggaccaaaaaccggtacttgcctgcctttgaaaaggtgttgaagagccatggccaagactaccttgtaggtaacaggctgacccgggtagacatccacctgctggaacttctcctctatgttgaagagtttgatgccagccttctgacctctttccctctgctgaaggccttcaagagcagaatcagcagcctccccaatgtgaagaagttcctgcagcctggcagtcagagaaagcttcccgtggatgcaaaacaaatcgaagaagcaaggaagattttcaagttttagcggagctgcactgtccaatttctttatgttttgcaaaaaatgagaagcaattgttgatcctaggtatttttgaaataataaacacgaaaaaatactcta

SEQ ID NO: 555 - DNA, 831 bp, Homo sapiens; identical to SEQ ID NO: 554

SEQ ID NO: 556 - DNA, 1055 bp, Homo sapiens
gctgaagcaaattgagaagaccacagcgccagaaccatgcctatgatactgggatactggaacgtccgcgggctgacacacccgatccgcctgctcctggaatacacagactcaagctatgaggagaagagatacgccatgggcgacgctcccgactatgacagaagccagtggctgaatgagaagttcaaactgggcctggacttccccaatctgccctacttaattgatggatcgcgcaagattacccagagcaatgccataatgcgctaccttgcccgcaagcaccacctgtgtggagagacagaggaggagcggattcgtgcagacattgtggagaaccaggtcatggacaaccgcatgcagctcatcatgctttgttacaaccccgactttgagaagcagaagccagagttcttgaagaccatccctgagaagatgaagctctactctgagttcctgggcaagcgaccatggtttgcaggggacaaggtcacctatgtggatttccttgcttatgacattcttgaccagtaccacatttttgagcccaagtgcctggacgccttcccaaacctgaaggacttcctggcccgctttgagggcctgaagaagatctctgcctacatgaagagcagccgctacctctcaacacctatattttcgaagttggcccaatggagtaacaagtaggcccttgctacactggcactcacagggaggacctgtccacattggatcctgcaggcaccctggccttctgcactgtggttctctctccttcctgctcccttctccagctttgtcagccccatctcctcaacctcaccccagtcatgcccacatagtcttcattctccccactttctttcatagtggtccccttctttattgacaccttaacacaacctcacagtccttttctgtgatttgaggtctgccctgaactcagtctccctagacttaccccaaatgtaacactgtctcagtgccagcctgttcctggtgggggagctgccccaggcctgtctcatctttaataaagcctgaaacac

SEQ ID NO: 557 - DNA, 1055 bp, Homo sapiens; identical to SEQ ID NO: 556

SEQ ID NO: 558 - DNA, 1055 bp, Homo sapiens; identical to SEQ ID NO: 556

SEQ ID NO: 559 - DNA, 3133 bp, Homo sapiens
gaattcgcgcacgagagcacatgctggatggactctggttccgccctttgtgcagacaaaagtgactgggtggccaggctttgcttactgtctgagttaatgaagcttgtttgataaggttttctttcaaaaaaaaattacatataaaggatttatcaaaagccctcatgaatatttcatgagttgatacattcggctgaatggattcagtgagtctcagtgtgtaacttgcacacaagccccatccacaaggaggctggtgacagaggaagcactttggcgcattttcagaggcaaaggcagcctgataaagctcctgtgacaggctgacttgccattctcccagtatgctgctcttgctctgaagtgctccaggattggaaccatcacggcttcccaaattagcctaggacgagtgtgcggacccagcagccttttaacctgcggcagtgcctttgctatgttcaagactgttgttgtggatggtgaaagctagcgcgccacacgagacatgacagcaaaaaattcttccaaagaacttccagcttctgaatctgaggtttgcataaagactttcaaggagcagatgcgcttggaacttgagcttccaaagctaccaggaaacagacctacatctcccaaaatttctccacgcagttcaccaaggaattcaccatgctttttcagaaagttgctggtgaataaaagcatccgacagcggcgtcgcttcactgtggctcatacatgctttgatgtggaaaatggcccttctccaggtcggagcccactggaccctcaagccagctcttcttcaggactggtacttcatgccgccttccctgggcacagccaacgcagagagtcttttctctacagatccgacagcgactatgacttgtcaccaaaagcgatgtcaaggaactcctcacttcccagcgaacaacacggcgatgacctgattgtcactccttttgcccaggttcttgccagcttgcgaatcgtaagaaacaatttcaccctgctgacaaaccttcacggagcaccgaacaagaggtcgccagcggctagtcaggctccagtcaccagagtcagcctgcaagaagaatcatatcagaaactagcaatggagacgctggaggaactagactggtgcctagaccagctagagaccatccagacctaccgctctgtcagcgagatggcttcaaacaagttcaaaaggatgctgaaccgggagctgacacacctctcagagatgagcagatcagggaaccaagtgtctgaatacatttcgaacacgttcttagacaagcagaacgatgtggaaatcccatctcccacccagaaggacagggagaagaagaagaagcagcagctcatgacccagataagtggagtgaagaaactgatgcacagctcaagcctgaacaacacaagcatctcacgctttggagtcaacacggaaaatgaggatcatctagccaaggagctggaagacctgaacaaatggggccttaacatcttcaacgtggctgggtactcccataatcggcccctcacatgcatcatgtacgccattttccaggaaagagaccttctaaagacgtttaaaatctcctccgacaccttcgtaacctacatgatgactttagaagaccattaccattctgatgtggcgtatcacaacagcctgcacgctgctgacgtggcccagtcaacgcacgttctcctctctacgccagcactggatgctgtcttcacagacctggaaatcctggctgccatttttgcagctgccatccatgatgttgatcatcctggagtctccaatcagtttctcatcaatacaaattccgaacttgctttgatgtataatgacgaatctgtgctggaaaaccatcacctcgctgtgggattcaagctccttcaagaggaacattgcgacatctttcagaatcttaccaagaagcaacgccagacactcaggaaaatggtgattgacatggtgttagcaactgatatgtccaagcacatgagcctcctggctgaccttaaaacgatggtagaaaccaaaaaggtgacgagctccggtgttctcctcctggacaactatactgaccggatacaggttcttcgcaacatggtacattgtgcagacctgagcaaccctaccaagtccttggagttgtatcggcaatggactgatcgcatcatggaggagtttttccaacagggagacaaagaacgggagaggggaatggagattagcccaatgtgtgataaacacacagcttctgtggaaaagtcccaggttggtttcattgactacattgtccatccattgtgggagacctgggcagacctggttcagcctgatgctcaagacattttggacacactagaagataacaggaactggtaccagagtatgattccccagagcccctctccaccactggacgagaggagcagggactgccaaggccttatggagaagtttcagttcgaactgacccttgaagaagaggattctgaaggaccggaaaaggagggagaaggccccaactatttcagcagcacaaagacactttgtgtgatcgatccagagaacagggattctctggaagagactgacatagacattgccacagaagacaagtctctgatcgacacataatctccctctgtgtggaggtgaacattctatccttgacgagcatgccagctgagtggtagggcccacctaccagagccaaggcctgcacaaaacaaaggccacctggctttgcagttacttgagtttggagccagaatgcaaggccgtgaagcaaatagcagttccgtgctgccttgccttgccggcgagcttggcgagacccgcagctgtagtagaagccagttcccagcacagctaaatggcttgaaaacagaggacagaaagctgagagattgctctgcaataggtgttgaggggctgtcccgacaggtgactgaactcactaacaacttcatctataaatctcacccatcctgttgtctgccaacctgtgtgccttttttgtaaaatgttttcgtgtctttgaaatgcctgttgaatatctagagtttagtacctccttctacaaactttttt

SEQ ID NO: 560 - DNA, 1663 bp, Homo sapiens
cagccacattttgtccacaaactctgtcctgaaaggggactgactgaagaaaacatccagcaagctctgggcaaggaaggacagcagcagagagcgagggccgtgttcgctgtgccagaggatggaggtgcacaacgtatcagcccctttcaatttctccctgccgcctggctttggccaccgggccacagacaaggcgcttagcatcatcctggtgttaatgttgctgcttatcatgctctcactgggctgcaccatggaattcagcaagatcaaggctcacttgtggaagcccaaaggggtgatcgttgccttggtggcccagtttggcatcatgcccctcgctgcttttcttctcggcaagatctttcacctgagcaacattgaagctctggccatcctcatctgtggctgctctcccggggggaacttgtccaacctcttcaccctggccatgaagggggacatgaacctcagcatcgtgatgaccacctgctccagcttcagtgccttgggcatgatgccactcctcttatacgtctacagcaaaggcatctacgatggagaccttaaggacaaggtgccctacaaaggcattatgatatcactagtcatagttctcattccttgcaccatagggatcgtcctcaagtccaaaaggccacactatgtaccctacatcctcaagggaggcatgatcatcaccttcctcctctctgtggctgtcacagccctctctgtcatcaatgtgggcaacagcatcatgttcgtcatgacaccacacttactggctacctcctccctgatgcccttctctggctttctgatgggttacattctctctgctctcttccaactcaatccaagctgcagacgcaccatcagcatggaaacaggattccaaaacattcaactctgttctaccatcctcaatgtgaccttcccccctgaagtcattgggccacttttcttctttcctctcctctacatgattttccagcttgcagaaggacttctcatcatcattatcttccggtgctatgagaaaatcaagcctccaaaggaccaaacaaaaattacctacaaagctgctgcaactgaggatgctactccagcagctctggaaaaaggtacccacaatgggaatattcctcctctccaacctggtccttcccctaatggcctgaattctggtcagatggcaaattagaatgtgaaacttcgaagcagcaagaaaaggaacgaacgtcgacgttgccggaatgtttgtctagcacttcgggcaaaccatcagaaccatggagccatgaactgagacagaagggcatctatctatccagtaactgtaacccataccaatttgcttttgtttaaattttctatttaaaagataaacaagaattaggcaaaaatgttcctgcctataatcccgatgctcagaaactcaagatcaaccttaagtatacaaaacaagactgtctcaagaaaccaaaaacacttttcagtggctatgaactctatgaaagctgaaccaaacagcttcatctgataaacattaacttcactatttccaaactttccagtaagcaggtgttttgttcattaaacatccacaacctgcttcatgttactcaaaatgaaataaagtgcaactcctagttct

SEQ ID NO: 561 - DNA, 1358 bp, Homo sapiens
cgacctcaaagcaagagagcgacatggcagctcctgctaagggcgagaacctgtccctggtggtgcacggacctggagacattcgcctggagaactacccaatccctgagctgggcccaaatgatgtgttactaaagatgcattcggtggggatctgtggctcggatgttcactactgggagcatggccgaattggggacttcgttgtgaaaaagccaatggtgcttgggcatgaagctgctggaacagtcacaaaagtgggaccgatggtgaaacatctaaaaccaggagatcgggtggccatcgagcctggcgttccccgagaaatagatgaattctgcaagatcggccgatacaatctgacgccatccatcttcttctgtgccacgcccccagatgatgggaacctctgccgcttctacaagcacagcgctgacttctgctacaagcttcctgatagtgtcacctttgaagaaggggccctgattgagcctctctctgtggggatctatgcctgccgtcgaggttcggtttccctggggaacaaggtccttgtgtgtggagctgggccaattgggatagtcactttgcttgtggccaaagcaatgggagcttctcaagtagtggtgattgacctctctgcttctcggttagccaaggccaaggaagttggagcagactttaccatccaggttgccaaagagacccctcacgacattgccaagaaggtggaaagtgtgctggggagcaagccagaggtcaccatcgaatgcacgggagcggagtcctctgtccaagacggcatctatgccactcactctggcgggaccttggtggttgtgggaatgggccccgagatgatcaatttacccctagtgcacgcagctgtgcgggaggtggacatcaaaggcgtgtttcgatactgcaacacgtggccgatggcagtttccatgcttgcatcgaagactttgaatgtaaagcccttagtgacccataggttccccctggagaaggctgtagaagcctttgaaacagccaaaaagggactggggctgaaagttatgatcaagtgtgaccccaatgaccagaacccctaaatgtgattgctctatgcccttagcccactctctcagcatctaagggctaaatggaccagaaggggaagccattaatgcagaaccttctttttgaatggtaggaataataaactcataagccgagagccttagaggagctggcgtgccttaaagacagaagtaggggcaccttgggggacctcgtagccagaatgagatgcgtatactgagtaaagtctagaaccaagagtctggcagagaggtcccgaaatgccctttctc

SEQ ID NO: 562 - DNA, 1743 bp, Homo sapiens
ccgtcccagcatgcagaaggacgcctcctccagcggcttcctgcccagcttccagcactttgccactcaggccatccacgtgggaccagagccggagcaatggagttcgcgtgctgtggtgctgcccatttcgctggccaccacgttcaaacaggactctccaggccagtcctcgggttttgtatacagccgctctggaaatccgacgaggaattgcttggaaaaagcagtggctgcactggatggggcaaagcactgtttgaccttcgctcggggccttgccgccaccacaacgattacccatcttttaaaagcaggagatgaagtcatttgcatggatgaagtgtatggaggcaccaacaggtacttcaggagggtggcatccgagtttggactgaagatttcttttgtggattgttccaaaaccaaattgctggaggcagcgatcacaccacagaccaagcttgtttggattgaaacacccacaaacccaaccttgaagttggccgacatcaaagcctgcgcacaaattgtccacaaacacaaagacatcattctggttgtagataacactttcatgtctgcatatttccagagacctttggctctgggtgctgatatttgtatgtgttctgccacaaaatacatgaacggccacagtgatgttgtcatgggcttagtgtctgttacttccgatgacctcaacgaacggcttcgtttcctgcagaattctctcggggcagttccttctcctttcgattgttacctctgctgccgaggcctgaagacactgcagatccggatggagaaacacttcaggaatgggatggcagtggcccgtttcctggagtctaatccccgggtagaaaaggttatttatcctgggctaccgtctcaccctcagcatgagctcgccaaacgtcagtgcacgggctgccccgggatggtcagtttctatatcaagggtactctgcagcatgctcaggtcttcctcaaaaatataaagctgtttgctctggctgagagcctgggaggatatgagagtctggctgagcttccagcaatcatgacccatgcctccgtgcctgagaaggacagagctaccctcgggatcagtgacacactgatccgactttctgtgggcctagaggatgaaaaggaccttctcgaagacctgggtcaagctttaaaggcagcgcacccttaaagttcgagtcaaagccggcattccagtgctgccatcagcagcagcagccaaggggccagaccttctgaataactggacagaccattaaggagcatctgcagaacttcgcagtgaacattttaagaccctagtgattttacagctgtaaccttacagggatcttcccttaaggactgtcttctgctaacaggttgttctgttagtatcattctgatagttttgctgtatttgtgttcaaggaagagagttgtattattttggggatcatgttgcttcttttttcctttttctttcttcggtagcctaagatatgttttaatcatgtttacaaaatttagtattgatgttttatgaagttaaattattcaatgaacggtcttaaatcaactgtaggggttttttttttgaaaaattattgaaagtggggggtctttatttaattaccataagccaaaaaaatcaaatatttggaatatctactgtgaaattctagtgattaaaggttgtacttgatacttgttgtttttcttaaatgg

SEQ ID NO: 563 - DNA, 1743 bp, Homo sapiens; identical to SEQ ID NO: 562

SEQ ID NO: 564 - DNA, 1265 bp, Homo sapiens
cggcctgggaggttgtagaaagagctgcaggttttctttgtgtgtcctacagagctccctgagccaggtccctgttggacggcagttatgaaaaaatacctcctccccgtcctggtgctctgcctgggttactactattctacaaatgaagagttcagaccagaaatgctccaggggaagaaagtgattgtcactggggccagcaaagggatcggaagagaaatggcatatcatctgtcaaaaatgggagcccatgtggtattgactgcaaggtcggaggaagggctccagaaggtggtgtctcgctgccttgaactcggagcagcctctgctcactacattgccggcactatggaagacatggcttttgcagagcgatttgttgttgaggcaggaaagctcttgggtggactggacatgctcattctcaatcacatcacacagaccactatgtctctcttccacgatgatatccactctgtgcgaagaagcatggaggtcaacttcctcagctatgtggtcctgagcacagcagccttgcccatgctgaaacagagcaatggcagcattgccatcatctcctccatggctgggaaaatgacccaacctctgattgcttcctactctgcaagcaagtttgctctggatgggttcttttccaccattagaaaagaacacttgatgaccaaggtcaacgtgtccatcactctctgtgtcctcggcttcatagacacagaaacagctttgaaagaaacctctgggataatcttgagtcaagctgctcccaagcaggaatgcgccctggagatcaaaggcacagttctgcgcaaagatgaggtatactatgacaaatcatcttggactccacttctgcttgggaatccaggaaggaggatcatggaatttctttcattacggtcatataacagggacctatttgtaagcaactaggaactcctgaggcctggtgaagggtcttggaacagtcctgcctgatatttctgtgagccctacccacaaatttctctgagcccctttccagagatacacaaattttggggtacacctcaccatgagaaattcttgcaacacttgcacagtaaaaatgtaattgtaataaatgtcacaaaccactttgtagcctgcagttgtgaacttgattgtaactatggatttaagcacacagttgtatcaattttacctcatacagaatgaaacaatgatgcctaatgtaacattaaataaaataaaggtaatatcaaccg

SEQ ID NO: 565 - DNA, 988 bp, Homo sapiens
caggatggtggacagcgtgtaccgtacccgctccctgggggtggcggccgaagggatccccgaccagtatgcggatggggaggccgcacgtgtgtggcagctgtacatcggggacacccgcagccgtactgcagagtacaaggcgtggttgcttgggctgctgcgccagcacgggtgccaccgggtgctggacgtggcctgtggcacaggagtggactcgattatgctggtggaagagggctttagcgtcacgagtgtggatgccagcgacaagatgctgaaatacgcactgaaggagcgctggaaccggaggaaggagccagcctttgacaagtgggtcattgaagaagccaactggttgactctggacaaagatgtgccagcaggagatggctttgacgctgtcatctgccttgggaacagttttgctcacctgccggacagcaaaggtgaccagagtgagcaccggctggcgctaaagaacatcgcaagcatggtgcggcccgggggcctgctggtcatcgaccaccgcaactacgactacatcctcagcacgggctgtgcacccccagggaagaacatctactataagagtgacctgaccaaggacattacgacgtcagtgctgacagtaaacaacaaagcccacatggtaaccctggactacacagtgcaggtgccaggtgctggcagagatggcgctcctggcttcagtaagtttcggctctcttactacccacactgtttggcgtctttcacggagttggtccaagaagcctttgggggcaggtgccagcacagcgtcctgggtgacttcaagccttacaggcccggccaggcctacgttccctgctacttcatccacgtgctcaagaagacaggctgagcctggctccggctcccaccctaagaccatcgcctaccacagatattgcagagatgtggggggcaggcaaacagggagtcgacaatacagccttcccttgcc

SEQ ID NO: 566 - DNA, 988 bp, Homo sapiens; identical to SEQ ID NO: 565

SEQ ID NO: 567 - DNA, 988 bp, Homo sapiens; identical to SEQ ID NO: 565

SEQ ID NO: 568 - DNA, 2950 bp, Homo sapiens
gaattccggagagaccacaagatagaggattattaatttatggggattttttggagatttatatacccaagcaacaactcctagatgctacagaccaagacaccaagaaataaccacgaaattctactttcaaccctagcttctctaccagattttaactaaacaagatcttcttgcaaaggtctcaggtatggatctttggcgggtgttcttaaccctggcactggcagtctccagcgacatgtttcctggaagtggggctacaccagctactcttggcaaagcttccccggttctgcaaagaattaatccaagcctgagggaaagttcctctggaaagcctcgattcaccaagtgtcgttcccctgaactggagaccttttcatgctactggacagaaggggatgatcataatttaaaggtcccgggatctattcagctatactatgctagaagaattgctcatgaatggaccccggaatggaaagaatgccctgattatgtctctgctggagcaaacagctgttacttcaactcatcgtatacctccatttggataccctactgcattaagcttactacaaatggtgatttgttggacgaaaagtgtttcactgttgatgaaatagtgcaacctgatccgcccattggcctcaactggactttactaaacatcagtttgcctgggatccgtggagatatccaagtgagttggcagccaccgcccagtgccgatgttctgaagggatggataattctggagtatgaaattcagtacaaagaagtaaatgaaacaaaatggaaaacgatgagcccgatatggtcaacatcagtcccactgtactcactgagactggataaagagcacgaagtgcgtgtgagatccagacaacggagcttcgaaaagtacagcgagttcagtgaagtactccgtgtaacgtttcctcagatggacacactggcagcatgtgaagaagatttccggtttccatggttcttaattattatctttggaatatttggagtagcagtgatgctatttgtagttatattttcaaagcagcaaaggattaagatgctgattttacccccagtaccagttccaaagattaaagggattgatccagatcttctcaaggaaggaaaattggaggaggtgaacaccatcttgggcattcatgataactacaaacccgacttctacaatgatgactcctgggttgagttcattgagctggatattgatgatgcggatgagaagactgaagagtcagacaccgacagacttctaagcgatgaccaggagaaatcagctggtatccttggagcaaaggatgacgattctggacgtaccagctgttatgaccctgacattttggataccgatttccacaccagtgacatgtgcgatggtacctcggagtttgctcagccgcagaagttaaaagcagaagctgatctcttgtgccttgaccagaagaatctgaagaactcgccttatgatgcttcccttggctctctgcacccctccattaccctgacaatggaagacaaaccacagccacttctgggcagtgaaactgagtcaacccaccaactcccctctacaccaatgagcagtcccgtgtcactggcaaacattgacttttatgcccaagtaagcgacattacaccagcaggtggtgtagtcctttctccaggccaaaagattaaggcagggttagcccagggcaacacccagctggaggtggccgcgccctgccaagaaaattacagcatgaacagtgcctacttctgtgagtcagatgccaaaaagtgcatcgctgcggcccctcacatggaggccacgacatgtgtaaaaccaagctttaaccaagaggacatttacatcaccacagaaagccttaccactactgcccgaatgtccgagacagcagataccgctccagatgctgagcctgtcccagactacaccacggttcacaccgtgaagtccccaaggggccttatactcaacgcgactgctttgcctttgcctgacaaaaagaagtttctctcctcatgtggctatgtgagcacagaccaactgaacaaaatcatgcagtagcctttcctatctttaatggcaaaagaaatgactgggcacgaacgcctaaaccaaaactatgttttaaatctgtgttgggagagcgtgagagtgaatgtggattcaaaaataccttttctggaaacgtcgaaacattatcataacgtggaaaatcaagaatatgtaatcagatagatactcccattgtgaattttaaatattttaagatcgtctttaagactgtttgtggcagtgattgtctgtgctgtgggtcttaactttgtgatactaagttattaaatagctacgtttttcatgtatgtagatcattgctttttttgaaaaagcaaaacaatcaggtggcttttgcagttcaggaaattgaatgcagattttagcacagactgatttctttttcctttttaaatagctaggagctaaaactctaggggagaaggtaaaactagtttggatatgcaaaacatttattttgacataaaattgataaagatatttttaataatttacactgtaagcatgagtattttataatacactacagatatattgttagttcacaacaatccatctacggatgtaacaactacaatgtgtagaggggttgatgctttggtcaatgaacctaaagaaaaatgaacaagttagatttttacaaagcccttttttataactcccaaaacttcttaaatctaaaaatgtctgcattattggaacaaacccattttaaatttgtaaatgaatatttttttaattttgaaaactttaattttttatacaaattaacgtatcatacaccaaacagtaacagaagtgattataataatggaagaaacagtttcttcc

SEQ ID NO: 569 - DNA, 2950 bp, Homo sapiens; identical to SEQ ID NO: 568

SEQ ID NO: 570 - DNA, 3556 bp, Homo sapiens
ctgactcatttgctgtttcctggacagtcattgctgagtttcaccctgccttcttcccgttgagtctcaactttcgcaccccaacttgcaagtgccctcccccaccctcctccacggcaaccgggcctcgccatcccgggatctgtccgaaggtggcagcattggcccctcagtcctccacggtcgggctgtcgctgtgcaggtcgccggctggccgcgtccggagcccagcgccgagcaggcctggagaggcggaggccacaccccgcgcgcggcccaggcgcttcccgccggtgaatcatccccgcagcggcagctcccgcagtccgctgcagcgccccgggcttggccgcgccccaaccgagtgctgcgccccgcctctccgcgacccctctctctgtgctgtgcgccatcccgatcgctaccatggcgggcatcgcgatgaaactggccaaagaccgcgaggcggccgaggggctggggtctcacgagagagccatcaagtacctcaaccaggactacgagacactgcggaacgagtgcctggaggccggggcgctcttccaggatccttccttccccgccctgccgtcgtccctgggcttcaaggagttggggccctactccagcaaaactcggggcatcgaatggaagcggcccacggagatctgcgcagacccccagttcattattggaggtgctacccgcacagacatctgccaaggagcccttggggactgctggcttctggctgccatcgcctccctcaccttgaatgaagaaatcctggctcgagttgtgcctctagaccagagcttccaggaaaactatgcaggcatcttccatttccagttctggcaatatggcgaatgggtggaggtggtggtggacgacagactgcccactaaggacggggagctgctctttgttcattcagctgaggggagcgagttctggagtgcccttctggagaaggcctatgccaagatcaatgggtgctatgaagcactctcagggggtgccaccactgagggctttgaagacttcacaggaggcattgccgagtggtatgagctgaggaagcctcctcccaatttgttcaagatcatccagaaggctttggagaaaggttctctgcttggctgctctatcgatatcaccagcgctgcggattctgaggccgttacgtaccagaagttggtgaaaggacatgcgtactccgtcactggagccgaggaggttgaaagctcaggaagcctgcagaaattgatacgtatcaggaacccctggggacaagtggagtggaccgggaagtggaatgacaactgccccagctggaacacggttgacccagaagtaagggcaaatctaacagaacggcaggaggacggagaattctggatgtccttcagtgacttcctgaggcactactctcgtctagaaatctgcaacctgaccccggacaccctcacctgtgactcctacaagaagtggaaactcaccaagatggatgggaactggaggcgaggctccactgcagggggctgcaggaattacccaaataccttctggatgaaccctcagtacctaatcaagctggaggaagaagatgaagatgatgaggatggggagaggggctgtaccttcctggtgggcctcatccagaagcatcggcggcggcagaggaagatgggtgaggacatgcacaccattggcttcggcatctatgaggtcccagaggagctaacagggcagaccaacatccacctcagcaaaaactttttcctgacaacccgagccagggagcggtcagataccttcatcaacctccgggaggtcctcaaccgcttcaagctgcccccgggagaatatgtccttgttccttccaccttcgagccccacaagaatggcgatttctgcatccgagtcttctcagagaagaaggctgactaccaaactgtcgatgatgaaatcgaggccaacattgaagagattgaagccaatgaggaggacattggagatggattcagaaggctgtttgctcagctggctggagaggatgcggagatctctgcctttgagctgcagaccatcttgagaagagttctagccaagcgcgaagacatcaagtcagatggcttcagcatcgagacctgtaagatcatggtggacatgctggatgaagatgggagcggcaagctggggctgaaggagttctacatcctctggacgaagattcagaaataccaaaaaatttaccgagagatcgacgtggacaggtcgggaaccatgaattcctatgagatgcggaaggctttggaagaagcaggtttcaagctgccctgtcaacttcatcaagtcatcgttgcccggtttgcagatgacgaactcatcatcgactttgacaactttgtgcggtgtttggttcggctggaaatactattcaagatattcaagcagctggaccctgagaacactggaacgatacagctcgaccttatctcgtggctgagtttttcagtactctgaagttacatgcctgaagatttctggtggaagaaaacagccaatgcctacacttaaatactttgtatctggaccttgaacgtacgggaacatttacttcatcgggtgattgtaactgaagctctaaccgtcagaggtggatgaactttcacatatcagagtaatggatctgcataccattaaccaaatgcaaatgaattgcataaccctcggtaaggtcagagagagctttatgcctgtacatagtatatcctttctacttctacacatcgtctcttcatagcaatattaaaccaggaaggactgttgagaggtttaagtaattgggcaaacagcaaattgatctcagaggccacaatgccttgatgggaatatttaaagaaatttaaaaatttaagatgcagtggtggcatcttccacagcaggccagagagaaacagagagagagagagagagacttggaaatacaataataaagtaatctgtggaggcgtctaaagaatccagtctgatggaggcatctaaagaatccagtctgatggaggcatctaaagaatccaggagccaggagtatctgacacaaggccaacctgggctacctagcaagacctgatctcaaaaaataaatgtcaattaaaaaaaaagaaggcatgtttccatcatttggttctaacaaaagatggtttttatacacctttgtgaacagcaagccctcttagactcaagtccttgaccatatttggccttagacattgaagtagtgagtagtgagatcatttgactgaccaactgagccaggtctgccatctgaaagaaaatcgtgatacaaccccagggatggtgcctacggctcgggagaacagggctcagaagatccttcttaaaacaaccaagctggcttcgtggtccgaggaaaatgctagcaaccatacagacatactgccttatccacttccaaacgtactgttaataaagagttgcaatgcaaaaaaaaaaaaaaaaaaaaaaaaaaaaaaaaaaaaaaaaaaaa

SEQ ID NO: 571 - DNA, 838 bp, Homo sapiens
gggacccaggggacccttggcactgcgcaggaccccgcgggacccggaaccttccgacagggttatggcggccgctccgggcgcccgactcctgcgcgctgcctgcgcctccgtcgcttttcgtggtctggactgccgtcggctgctggtctgcgggacccgtgcgggacctgccgtccctcagtggaccccgagcccccacacgcttgcagaggccggacctggccggccactgagcgtgtctgcgcgcgcgcggagtagctcagaagataaggtaacagtccacttcaagaaccgagatggtgaaacgctaacgaccaaggggaaagttggtgactctctgctagatgttgtgattgagaataacctagatatcgatggatttggtgcgtgtgaggggactttggcttgctctacctgtcatcttatctttgaggaccatatatatgagaagttagatgccattactgatgaagagaacgacatgcttgacctggcttttggactaacaaacaggtcacggctgggctgtcaagtttgtctgaccaaggctatggacaatatgactgtccgtgtgcctgaagcagtggcagatgtccgacagtctgttgacatgagcaagaattcctaagctacaataaaaagaatattttcattaaatttttacctatttttataattatttcttagcataattgattatatggccaaaatatgtagctgtgctgtcttagttcagttttgtagtactgaaaatttgcagtttttattttgattaaattattaaaatatcagtctattagaagacagctgatacaataaactccttatgtatttt

SEQ ID NO: 572 - DNA, 1386 bp, Homo sapiens
ctcagctgcaggaaccctggatgagcatgagctccaagccaaagcccatagagattatcggagcgcctttctctaagggacagcctcgaggaggggtagagaaaggtcccgcagcattaaggaaagctggcctggtggagaagcttaaagaaacagagtacaatgtgagagaccacggggatctggcctttgtggatgtccccaatgacagcccctttcaaattgtgaagaacccacggtctgtgggaaaagccaatgaacagctggctgctgtggtagcagagacccagaagaatggaacaatcagtgtggtgctgggtggagaccacagtatggcaattggaagcatctctggccacgccagggtccaccctgacctatgcgtcatttgggtggatgctcacactgacatcaacactccgctgacaaccagctctgggaatctgcacgggcaaccggtggcctttctcctgaaggaactgaaaggaaagttcccagatgtaccaggattctcctgggtgaccccctgcatatctgccaaggacatcgtgtacatcggcttgcgagatgtggaccctggggaacactatataataaaaactctgggcattaagtatttctcaatgactgaagtggacaagctgggaattggcaaagtgatggaagagaccttcagctacctgctgggaaggaagaaaaggcccattcacctgagttttgatgttgatggactggacccagtattcaccccggctacgggcacacccgttgtgggaggcctatcttacagagaaggtctctacatcacagaagaaatttacaagacagggctactttcaggactagatatcatggaagtgaacccaactcttgggaagacaccagaggaggtgactcgtactgtgaacacggcagtgccgttgaccttgtcttgttttggaacgaaacgggaaggtaatcataagccagagactgactaccttaaaccaccgaaataaatgtgaatacatcgcataaaagtcatctggggcatcacagcaaaccgaacagaaccaggccaacgctgctcctcccaagggcttgttcttttagaaaaaagaatgttttttcccaatatgtatgtattctagcagttcctttctggaatgaaattcagggtgtgggaattaaaacagctatgaaattaggagacacgtacttcccattttagcagaagttatccttaagaagtagtataaattaatatctaattaaaaaatgcaccaggagttaaaatacacagtgatgtcaagtgtcaactcacggttggaagcaaaggcatctggagacgaggcctgcatccacgtcgttcaaaacatgtgatttttgtaataaactctttataat

SEQ ID NO: 573 - DNA, 2199 bp, Homo sapiens
ccggaaggagttcggcaggtctcccggaccccctttgtgaactacattttgggtagaacattttaatcaccgaaacccttctgaggaaaaaaagactcccactgccccctgcaaaaaaacaaaagcaaaaacaaaaaaaccaaaccccaaacccccaaatctcagtcttagctggtgccaccaaagaagcttttgagccatgtggacttttcttggaattgctactttcacctatttttataagaaatgcggggatgtcaccctggccaacaaggagctcctgctgtgcgtactggtgttcctgtcgctgggcctggtgctctcctaccgctgtcgccatcgaaacgggggcctccttggccgccatcagagcggctcccagttcgctgccttctcagatattctctctgctttgcctcttattggcttcttctgggccaaatcaccccctgaatcagaaaagaaagaacagctggagtccaagaggcgcagaaaagaagtcaatctgtcagagacgacgttaacgggagcagctacctcagtatcgacatcatctgtgacggacccagaagtgatcatcatagggtctggtgtacttggctctgctttggcaacagtactctctagagatggaagaacggtgacagtaatcgagagagatttaaaagagcctgacagaatacttggagagtgtctgcagcccggtggctatcgagttcttcgagagctgggccttggagatacagtagaaagtcttaatgcccatcatatacacggctacgtaattcatgactgtgaaagcaggtctgaagttcaaattccatacccggtgtcagaaaacaaccaagtacagagtggggttgctttccaccatggcaagttcatcatgagtctccggaaagcagctatggcagagcccaatgtaaagtttatagaaggtgttgtgcttcggttactagaggaagatgatgctgtgattggtgtgcaatacaaggacaaggagactggggacaccaaggagctccatgccccgctcactgttgttgccgacgggctcttctccaagttcaggaagaacctcatctccaataaagtctctgtttcctcccacttcgttggcttcattatgaaggatgcaccacagtttaaagccaatttcgcggagcttgttctggtcgatcccagtccagttctcatctaccagatttcacccagcgaaactagggtgcttgtcgatattcgaggagaattgccaagaaacttaagagaatacatgacagaacaaatttacccacagatacctgatcacttgaaggaatcatttctggaggcctgtcagaatgctcgtctgcggaccatgccagcaagcttccttcctccttcctcagtgaacaaacgaggcgtcctacttctgggagatgcgtataacctgaggcatcctcttactggtggaggaatgacagtcgctttaaaagatataaaaatatggagacaactgttaaaagatattcctgacctttatgatgatgccgctattttccaggccaaaaagtcattcttttggtcaagaaaaaggagccattcctttgttgtgaacgtgctggctcaggcgttgtatgaactattttctgctacagatgattccttgcgtcagctccgaaaagcttgctttctttattttaaacttggtggagaatgtttgactggtcctgttgggttgctttctatattgtctcctgaccctctcctattgattcgacacttcttctccgttgcagtctatgccacgtatttctgcttcaagtcagagccatgggctacaaaacctcgggctcttttcagtagtggtgctatactgtacaaagcgtgctctataatatttcctctcatctattcagaaatgaagtatctggttcactgaaagggaaaccacatggaagtcattgggacttgaggaggatgtacatagcctaggactgtgtgtgtgacttctgcagtggtgactcaaggaccaagcttgtgtataagcatgtaaatatatgccttaattcacaattgagaatgaagggtcaataagctagatgtttaaaagaatgattgtttccacaaattaatgttaacactcaagtgtttggatttcagtattggggtgattcaattggggacaatgccaaataaaatgaaggagtggaactcctt

SEQ ID NO: 574 - DNA, 1018 bp, Homo sapiens
gctggaacgggtccgtacggcgttgttcttggttcccatcgtaacttaaaagggaaacttacacaatgtccggaggccttgacgtcctgcagatgaaggaggaggatgtcctcaaattccttgctgcaggaacccacttaggtggcaccaaccttgactttcagatggagcagtacatctacaaaaggaaaagtgacggtatctacatcatcaacctgaagaggacttgggagaagctgttgttagccgctcgagctattgttgccattgagaaccctgctgatgtcagcgtcatctcctccaggaacactggccagcgagctgtgctgaagtttgccgctgccacaggagccactccaattgctggccgcttcacacctgggaccttcactaaccagatccaagcagccttcagggagccccggcttctagtggtgactgatccccgggctgaccaccagcccctcacagaggcctcttacgtcaacctgcccaccattgctctttgtaacacagattctcccctgcgctatgtggacattgccatcccatgcaacaacaagggagctcactcagtgggtctcatgtggtggatgctggccagggaagtactccgcatgcgaggaaccatctcccgggagcacccatgggaggttatgcctgatctttacttctacagggacccagaggagattgagaaggaggagcaggctgccgctgagaaggctgtgaccaaggaggaattccagggtgaatggacggcaccagcgcctgagttcactgctgctcagcctgaggtggccgactggtctgagggtgtgcaggtgccctctgtgcccattcagcagttccccacagaagactggagtgcacagccggccactgaggactggtcagcagctcccacagcacaggctactgagtgggttggagccaccactgagtggtcctgagctcctctgcaggtgcctgagcgaagggaaaaaaggtggaaggaaaataaagttcctgaaagctg

SEQ ID NO: 575 - DNA, 1018 bp, Homo sapiens; identical to SEQ ID NO: 574

SEQ ID NO: 576 - DNA, 1720 bp, Homo sapiens
ggagtgctgtcgcccgtgcgcctcctagcagctgccagaatgccaaactggggaggaggcaagaaatgcggggtgtgccagaagacagtctactttgctgaggaggtccagtgcgagggcaacagcttccacaaatcctgcttcctgtgcatggtttgcaagaagaatctggacagcaccactgtggcagtgcatggagaagagatctattgcaagtcatgttatggcaagaagtatggaccaaaaggctacggctacgggcagggtgcaggcacgctgagcatggacaagggggagtctctgggcatcaagcatgaggaagcccccggacacaggcctaccaccaaccccaatgcatccaagtttgctcagaagatcggcggctctgagcgctgtccgcgatgcagccaggcagtctatgcagcggagaaggtgatcggtgccgggaagtcctggcataagtcctgcttccgatgtgccaaatgtggcaaaggcctcgagtcgaccaccctggcagacaaggatggtgagatctattgcaaaggatgctatgccaaaaactttgggcccaaaggttttggctttggacaaggagctggcgccttggtccattcagagtgaggctgccgcctgcgtaccctgcctactcctgcactctcataagcagtccgttcctggaagccatggacacctccaagatcctctctctcactcagccctgctgcacatcactaatgccttggacttgggtgttctttggcttaggggtctgcctgagttccttccccactaagggcttcctcctgcctggcattcgatacccttatctttaggagacatctgtctagtcaccccttcccagataccaggtccctctccccacaccttacccctacagacctctgtggccaggacactctctactggccaggacacctgaccccacatctttggagcccaaaagagcaaggcggaagacctgcgctagggaaggctgtggtttattgtatcccagagtctctctctgggtaggatgctgagcttcttggtgcctctcagtctgggaagtccccgtgagaggcagagaggtgcggataggattgtggggtcatcagaaggagcttgttctctgacctcttgcctttgaatgtggaaataataacttttcacttagggatgaagaagaacgcaggtcagaggaccccaaaatctagaggttgcctgacctcaagttccctgttccatgggcaagggagagcctaatgaataccttgaacaagcattgacatggatcagtggtccagatcttagagtggtcagttctggttctaagcttgggtctggtggctgggatggacagcttctgttgcagcatagcccagggtagagctgtgttctagccactcctgagggtcctccgaaccccagtcctcctctccaacccagacccttcgttcaccccacctttctctagtaaaccttcgctcccttgcccatcccttccaggccccaaggtcaggagcagagggagggaggggaagagctgggccttaatgctcctggggatggggacggggacagaagggacaaggctgtgtacagctatttgctgcaagggctgtaggcatgggctgttgaagctgatttatcatctgatcaataaagcaatttagaactgaaaaaaaaaaaaaaaaaaaaaaaaaaaaaaaaaaaaaaaaaa

SEQ ID NO: 577 - DNA, 466 bp, Homo sapiens
cctcttttaccgagacccgtcaacatgggccgcgttcgcaccaagactgtgaagaaggcggcccgggtcatcatcgagaagtactacacgcgcctgggtaatgactttcacaccaacaagcgcgtgtgcaaggagatcgccatcatccccagcaaaaaccttcggaacaagatagccggctatgtcacgcatctgatgaagcggattcagagaggtcctgtgagaggcatctccatcaagttgcaggaagaagagagggagaggagagataattatgttcctgaggtctcagccctagatcaggagatcattgaggtagatcctgacaccaaggaaatgctgaagcttctggactttggcagtctctccaacctccaggtcactcagcctacggttgggatgaatttcaaaacaccacgtggagctgtttaatccattatgccatattttcaataaacctgaaaac

SEQ ID NO: 578 - DNA, 880 bp, Homo sapiens
ccttttggctctcagagcggcaccatggcggtcgggaagaacaagcgcctgacgaaaggtggcaagaagggagccaagaagaaagtggttgatccattttctaagaaagactggtatgatgtgaaagctccagcaatgttcaatattaggaacatcgggaaaacactagttacaaggactcaaggaaccaaaattgcatcagatggcctcaagggtcgtgtgttcgaagtgagtcttgcagatctacagaacgatgaagttgcatttagaaagttcaagctaattactgaggatgttcagggcaaaaactgtctgactaacttccatggcatggatcttacccgggacaaaatgtgctccatggtcaaaaagtggcagaccatgattgaagctcatgttgatgtgaagacgaccgatgggtatttgctccgacttttctgtgttggtttcactaagaaacgtaacaaccagattagaaagacatcctatgcgcagcaccagcaggtccgccagatccgcaagaagatgatggagatcatgacccgagaagtgcagacaaatgacttgaaggaagtagttaataaactgattccagacagcattgggaaagacatagagaaggcttgccagtccatctatcctctccatgacgtttttgttaggaaagtcaaaatgctgaagaaacccaagtttgaattgggaaaactcatggagctccatggtgaaggcggtagttctggcaaaacaactggtgatgagacaggtgctaaggttgaacgagctgatggctatgaaccaccagtccaagaatccgtttaaaatccagatttttaatagcgacaaataaaaagtcctatttgtgaaaaaaaaaaaaaaaaaa

SEQ ID NO: 579 - DNA, 2136 bp, Homo sapiens
ggtgagccatgcctaggtacacggtgcacgtgcgtggggaatggctggcggtaccctgccaggacgggaagctcagtgttggctggctgggccgcgaggctgtgcggcgctacatgaagaacaagccggacaacgggggcttcacctcggtggatgaagtgcgattccttgtgcgccggtgcaagggcctgggcctgttggacaatgaggacctgctggaggtggccctggaggacaatgagttcgtagaagtggtgattgaaggcgatgtaatgtctcctgatttcattccatcacagccagaaggcgttttcctttacagcaaataccgggagcctgaaaagtacattgccttggatggggacagtctgagcacggaggatctggtcaacctaggcaagggacattacaagataaagctcacttcaatagctgagaagaaagtgcagcagtcccgggaagtcattgacagcatcataaaagaaagaacagttgtttacggcatcaccacgggttttggaaaatttgccagaactgtgatccctgccaataagctacaggagcttcaggtcaacttagtccgttcccattcttcaggtgttgggaagccactcagtcctgagaggtgtcggatgctcttggctttgaggatcaatgtcttagccaaaggatacagtgggatttccttggagaccctgaaacaagtgattgaagtatttaatgcctcctgcctgtcctatgttccagagaaagggaccgttggtgccagcggagaccttgccccactctcccatcttgctttggggctcattggagaaggaaagatgtggtccccaaagagtggctgggccgatgccaaatatgtcttagaagcccacggattgaaaccaattgttctgaaaccaaaagaaggcctggcactcatcaacgggacacagatgatcacttccctgggctgtgaagccgtggagcgagccagcgccattgcccggcaagcggatatcgtggctgccttgaccctcgaggtgctgaagggcaccaccaaagccttcgataccgacatccacgccgtccgccctcaccgcgggcaaattgaagttgctttccggttccggtccctcttggactcagatcaccacccgtcagaaattgcagaaagccacaggttctgtgatcgtgttcaggatgcgtacaccttacgctgctgtccacaggtccacggtgtggtgaacgatacaattgcctttgtgaaggacatcatcaccacagaactgaacagtgccacagacaatcctatggtctttgccagtcgaggggagacaatttcgggaggaaacttccacggtgaatacccagccaaagccctggactatttggccattggcgtccatgaacttgcggcaattagtgaaagaagaatcgaaaggctgtgtaatccttccctcagtgagctgcccgccttcctggtggctgaaggaggtctcaattctggattcatgatagcccactgtaccgcagcagccctggtgtctgagagcaaggctctgtgccacccttcatctgtggactcactctctaccagtgctgccacggaggaccacgtctccatgggaggatgggcagccaggaaagctctcagggtcatcgagcacgtggaacaagtgctggccattgagcttctcgcggcctgccagggcatagagtttctgcgccccttgaaaacaaccactccgctggagaaggtgtacgacctggtgcgctccgtagtaaggccctggatcaaagatcgcttcatggccccggacatcgaggcagcacacaggttgcttcttgaccagaaggtttgggaggtggctgccccgtacatcgagaaatacagaatggagcacattccggaatccagaccgctttctccaacagcgttttcactagaatctctgaggaagaattcagccacaatcccagagtctgacgatctttaacgggcttcctcgagaacaggcacatgtgtcggatctgggcacatcactggtgtggtgacggagagtctcaggaaccgcccatgatgtgtagaactcatctcttttcaaacaaactctggttaaatcatggcagcaatacagtcattgaacccag

SEQ ID NO: 580 - DNA, 1054 bp, Homo sapiens
ggtccgagccgcctggcttaggcggaggcgacggcagggtagggagcagccgggaacgcggcgagcccctagccggggacacgggacgggcggagacctcgagccctgggctttccttgccagtggattgtgtagagtgtacagccagtctcttgtcttctgtccaacatggcatcttctgatattcaggtgaaagagctggagaagcgagcttccggccaggcttttgagctgattctcagccctcgatcaaaagaatctgtccccgagttccccctttcccccccaaagaagaaggatctttccctggaggaaattcagaagaaattagaagctgcagaagaaagacgcaagtctcatgaagcagaagtcttgaagcagctcgctgagaagcgggagcatgaaaaagaagtgctccagaaagccattgaggagaacaacaacttcagcaaaatggcagaggagaaactgacccacaaaatggaggctaacaaagagaaccgggaggcgcaaatggctgccaagctggagcgtttgcgagagaaggacaagcacgttgaagaggtgcggaagaacaaagaatccaaagaccccgcggacgagaccgaggctgactaagttgttccgagaactgactttctccccgaccccttcctaaatatccaaagactgtactggccagtgtcatttactttttcctccctgacaaatattctagaagctgatgtaggaaccgtataggtagatccagaccgtgagatgttttaggggctcaaggggagaaactgaaagtgttttgctcttttttaaagtgttggtctttctaacgtagctatttttctcgttgcatcttttcctctcgggcacactcggtgtgctgggttaatggctagtgctgtattgactgtggaagacgttcgtgaagagtatgtagtggcttcttccaacccattagatgctgagtatctgttcactttgcgatcccaattctgtcccaatctcaccagatgctactgtactggaatggttaataaactgcacagtgctgttggtc

SEQ ID NO: 581 - DNA, 931 bp, Homo sapiens
atctgaagagcatagggggccaccacactttcgtcccatacccaagcaacagctgctgctgctgtcataccctggaccaagcatggacaagctgctgctttggatgtctgtcttcaccagccttctttcagaagcctttgctcagacagacctcaatcagaaggtatttgtgttccccagagaatctgaaactgattatgtgaagctgatcccatggctagaaaaaccgctgcagaattttacactgtgtttccgagcctacagtgacctttcccgctctcagagtcttttctcctacagtgtcaacagcagagacaatgagctactaatttataaagcaaagttggaacaatatagcctatacattggaaattcaaaagtcacagtccgtggtttagaagaattcccttctccaatacatttctgtaccagctgggagtcctcctctggtattgctgaattttgggtcaatggaaagccttgggtaaaaaagggtttgcagaagggatacactgtgaaatcctcacccagtattgtcctgggacaggagcaggatacgtatggaggagggtttgataagacacagtcctttgtgggagagattgcagatttgtacatgtgggacagtgtgctgaccccagagaacattcattctgtggacagaggtttcccacccaatcctaatattttggattggcgggccctgaattatgaaataaatggttatgtagtcatcaagccccgtatgtgggacaacaaaagctcatgaaaatgagatgatcagggtgttcgaggtcaaggtggcagaactcactctatctggagttttttcttctttatgaatgtcctgtctaaatatctgccaaataaaaatcctatcaaattctaaaaaaaaaaaaaaaaaaaaaaaaaaaaaaaaaaaaaaaaaaaa

SEQ ID NO: 582 - DNA, 1493 bp, Homo sapiens
tgaatctaaaggctctcagctaggctgatctttgccctaagcataatcccgctagccaacccctacccgttgtgggttctgctgcccagtgctcttcagcatgtcctttattccggtggccgaggactccgactttcccatccaaaacctgccctatggcgttttctccactcaaagcaacccaaagccacggattggtgtggccatcggtgaccagatcttggacctgagtgtcattaaacacctctttaccggacctgtcctctccaaacatcagcatgtcttcgatgagacaactctcaatagctttatgggcctcggccaagcggcatggaaggaggcaagagcatccttacagaacttactgtctgccagccaagcccagctcagagatgacaaggagcttcggcagcgtgcattcacctcccaggcttctgccacgatgcaccttcctgctaccataggagactacacggacttctactcctctctgcagcatgccactaacgttggcattatgttcaggggcaaggagaatgcgctgttgcccaattggctccacttacctgtgggataccatggccgagcttcctccgttgtggtgtctggtaccccaattcgaagacccatgggacagatgagacctgataactcaaagcctcctgtgtatggtgccagcaaacgcttagacatggagttggaaatggctttctttgtaggccctgggaacagattcggcgagccaatccccatttccaaggcccaggagcacattttcgggatggtcctcatgaacgactggagtgctcgagacatccagcaatgggagtacgtcccccttgggccattcctggggaaaagttttggaaccaccatctccccatgggtggtgcccatggatgctctcatgccctttgtggtgccaaacccaaagcaggaccctaagcccctgccatatctctgccacagccagccctacacatttgatatcaacctgtccgttgctttgaaaggagaaggaatgagccaggcagctaccatctgcaggtccaactttaagcacatgtactggaccattctgcagcaactgacacaccactctgttaatggatgcaatctgagacctggggacctcttggcttctggaaccatcagtggatcagaccctgaaagctttggctccatgctggaactgtcctggaagggaacaaaggctatcgatgtggggcaggggcaaaccaggacctttcttctggacggagatgaagtcatcataacaggtcactgccagggggatggctaccgtgttggttttggccaatgtgctgggaaagtgctgcctgccctctcgccagcctgaagctccagaatccacagaacacagccttgccttgtgaggatcatactgcaactgcatgagtcaggaatgaataaagctattttgattggggaagtgccacagaaaaaaaaaaaaaaaaaaaaaaaaaaaaaaa

SEQ ID NO: 583 - DNA, 2029 bp, Homo sapiens
ctcactctagcggacttcgccagcatggctgataaactgccctacaaagtcgcggacattggactggctgcctggggacggaaggccctggacatagctgagaacgagatgccaggtttgatgcgcatgcgggagatgtactcagcctccaagccactgaagggcgctcgcattgctggctgcctgcacatgactgtggagactgctgtcctcattgagactctcgtggccctgggtgctgaggtgcggtggtccagctgcaacatcttctccactcaggaccatgcagcggctgccattgccaaggctggcattccagtgtttgcctggaagggagagacggatgaagagtacctgtggtgcattgagcagacgttgcacttcaaggacggacccctcaacatgattctggatgatggcggtgaccttactaacctcatccacaccaaacacccacagcttctgtcaggcatccgaggtatctctgaggagaccacgactggcgtccacaacctctacaagatgatggccaatgggatactgaaggtgcctgccatcaacgtcaacgattctgtcaccaagagcaagtttgacaacctctatggctgccgggagtccctcatagatggcatcaaacgggcaacagatgtgatgattgcgggcaaggtggcagtggtagcaggctatggtgatgtgggcaagggttgtgcccaggccctgcggggtttcggggcccgagtcatcatcaccgagattgaccccatcaatgcactgcaagctgccatggagggctacgaggtaaccaccatggacgaggcctgtaaggagggcaacatctttgtgaccaccacgggctgtgttgatatcatccttggtcggcactttgaacagatgaaggatgatgccattgtctgtaacattggacacttcgacgtggagattgatgtgaagtggctcaatgagaacgctgtggagaaggtgaacatcaagccccaggtggaccgctacttgctaaagaatgggcaccgcatcatcttgctggctgagggccgtctggtcaacctgggttgtgccatgggccaccccagcttcgtgatgagcaactccttcacaaaccaggtgatggcacagattgagctgtggacccacccagacaaataccccgtgggggttcacttcctgcctaagaagctggatgaggcagtggctgaagcccacctgggcaagctgaacgtcaagctgaccaagctgactgagaagcaggctcagtacctgggcatgcccattaacggccccttcaagcctgatcactaccgctactgagagctgggactgcccttcaccttccagctgccatccttgttccaggccctacctctcgttcccaagagcaaatgtcaccaactttgcagttacttctccggtgttctgctccctcccccggccctcatccacactgtgactggtctttctgtctttggcttctgctgtacccctcatactgttccctatgtggcatagagaacagagaggtacctgggaggcatccacaggggatctgagctcttggaaggtctgaggctggatgttgctggtggtcacaagcccatgcaccttactatccaaactctcgcttggtctttagatccgtgtgcttggtttacagaccaatggtttctcggcccaggacccaagaaggagctctaccatgggggaaggaaccactggagtttgaaggctcctgagagcttggcctttttactgttgggctgtctcttaaacctcctaatactgagttggctacttttggtccctatttcacaagggttaggacagattaaccaagaaaggacaagtgacagagactgaaaggggctggaaaaacaaatagggaaaggcctgtcacctacggtataattgatggttcctatcacaagcctggatcacaaacagattaatttgttctatgtttatatactgtttagaatgttaacacaggaaggtggataaaatacagtttctagtgcct

SEQ ID NO: 584 - DNA, 1075 bp, Homo sapiens
gtttaactgcactcgggactcggcgcgcgcgtgtgtctgttctctccatcgtcatggccgccgacatcagccagtgggccgggccgctgtcattacaggaggtggatgagccgccccagcacgccctgagggtcgactacggcggagtaacggtggacgagctgggcaaagtgctgacgcccacccaggtcatgaatagaccaagcagcatttcatgggatggccttgatcctgggaagctctacaccctggtcctcacagaccccgatgctcccagcaggaaggaccccaaattcagggagtggcaccacttcctggtggtcaacatgaagggcaacgacattagcagtggcactgtcctctccgaatacgtgggctccggacctcccaaagacacaggtctgcaccgctacgtctggctggtgtatgagcaggagcagcctctgaactgtgacgagcccatcctcagcaacaagtctggagacaaccgcggcaagttcaaggtggagtccttccgcaagaagtaccacctgggagccccggtggccggcacgtgcttccaggcagagtgggatgactctgtgcccaagctgcatgatcagctggctgggaagtaggggcgctgcagagcccgcagccccggggaccccacagtacagtcaagtcgtataaagcatgtctgtggggtgtccccccacgcccatccttccttcccaccctctcatagggagttctcagttgtgctaggttacagctctaggatgtcttccactttgtccaggaccaggcccagtaacatcttttggggtgggcttatcaatcctcccatctcggctgagccctgaccgcccaggtcagatggctgcatagttatcaatattcctgggctgctgctacgcagtgctgctgtgtggaggccaggctgtggagagagaccctgttagccccttacatcccagtgggataagcaaaagtcaccggagttgctgggcgtgttaaacctcatcaaatacaaataaagggcattgcattcagaaaaaaaaaaaaaaaaaaaaaaaaaaaaaaaaaaaaaaaa

SEQ ID NO: 585 - DNA, 1075 bp, Homo sapiens; identical to SEQ ID NO: 584

SEQ ID NO: 586 - DNA, 2944 bp, Homo sapiens
cgccatcgtcggcgcgcttccctgttcacctctgtatttgagaatccgacgccatctgccaccatggtgaacttcacagtagatcagatccgtgccatcatggacaagaaagccaacatccggaacatgtcagtcatcgctcacgtggaccacggcaagtccacgttgaccgactcccttgtgtgcaaggctggcatcatcgcctctgcccgagccggggagacacgcttcactgacactcgaaaggatgagcaggagcgctgcatcaccatcaagtccactgccatctccctcttctatgagctctccgagaacgacctgaacttcattaagcagagcaaggatggctcgggcttcctcatcaacctcattgactctccaggtcatgtggacttctcctcagaggtgaccgctgctctgcgtgtcactgatggagcactggtggtggtggactgtgtgtctggtgtctgtgtgcagacagagacagtgctgcggcaggccatcgctgagcgcatcaagcccgtgctgatgatgaacaagatggaccgggccctgctggaactgcaactggagcctgaggagctctaccagaccttccagcgcatcgtggagaacgtcaatgtcatcatctccacctatggcgagggcgagagtggacccatgggcaatatcatgatcgatcctgtcctgggcactgtaggctttggctctggcctgcatgggtgggccttcacactgaagcagtttgcagagatgtatgtggccaagtttgcagccaagggtgagggccagctgggtgcagctgagcgggccaagaaggtagaagacatgatgaagaagctgtggggagaccggtactttgacccggccaacggcaagttcagcaagtcagccaatagcccagacgggaagaaacttccccgcaccttctgccagctcatcttggaccccatcttcaaggtgtttgatgccatcatgaacttcaggaaggaggagacagccaagctgatcgagaagctggacatcaagctggacagtgaggacaaggacaaggagggcaaaccactgctgaaggctgtgatgcgtcgctggctgcctgctggtgacgccctgctacagatgatcaccatccacttgccgtccccggtcactgcacagaagtaccgttgtgagctgctgtacgagggcccacctgatgacgaggccgccatgggtattaagagctgcgaccccaaaggccccctaatgatgtacatctccaagatggtgccaacatctgacaaaggccgcttctatgccttcggtagagtgttctctggggtggtgtccacaggtctgaaggtccggatcatgggccccaactatacacctgggaagaaggaggacctgtacctgaagcctatccagaggaccattctgatgatgggccgctatgtggaacccattgaggatgtgccctgtggcaacattgtggggttggtcggggtggaccagttccttgtgaagaccggcaccatcactacctttgagcacgctcacaacatgcgggtgatgaagttcagcgtcagccctgtcgtcagggtggcagtggaggccaagaacccagctgacctgcccaagctggtggaggggctgaagcggctggctaagtctgaccctatggtgcagtgcatcatcgaggagtctggggagcacatcattgctggtgctggagagctgcacctggagatctgccttaaggacctggaggaggaccatgcctgcatccccatcaagaaatctgaccctgtcgtgtcctaccgggagacagtcagtgaggagtccaacgtgctctgtctttccaagtccccaaacaagcacaacaggctgtacatgaaggccaggcccttccctgatggcctagcagaggacatcgataagggtgaggtatctgcccgccaggagctcaaggcgcgtgcccgttacctggccgaaaagtatgagtgggatgttgctgaagcccgcaagatctggtgctttggacctgatggcactggtcccaacattctcaccgacatcaccaagggtgtgcagtacctgaatgagatcaaggacagtgtggtggctggattccagtgggccactaaggagggtgctctttgtgaggagaacatgcgtggtgtgcgatttgatgtccatgatgtgaccctgcatgctgatgccatccaccgaggaggtggtcagatcatccccacagcgcgccgctgcctctatgccagtgtgctgactgcacagccccgcctcatggagcctatctacctggtggagattcagtgtcctgagcaagtggtgggcggaatctatggtgtcctgaacaggaagcgtggccatgtctttgaggagtcccaggtagctgggacccccatgttcgtggtcaaggcctacctgcctgtcaatgaatcctttggcttcactgccgaccttcgatccaacactggtggccaggccttcccccagtgtgtgtttgaccactggcagatcctgcctggggacccctttgacaacagcagccgccccagccaagttgtagctgagacccgcaagcgcaaaggcctgaaggagggcatcccagcgctggacaacttcctggacaaactgtaggcagcctggtactgccacacgctgcacagtgcccgcccatcagaagacaccttgagactgtccccacagtgcccctctggaggctgctggggccatcctgacatcactcagcactcacttgctaccaattctatttatttcggaattacaaggcagcgtgaatggccctctgcaggctggactggcaggccgtggggtgggcagcacacggtggttagcattttcagagggaaataacgcagatgtccaaaattctaaataaatgcattcagaggttaaaaaaaaaaaaaaaaaaaaaaaaaaa

SEQ ID NO: 587 - DNA, 2519 bp, Homo sapiens
agagcccgtgaggcggccggaccatcatcgtcctgctaatacagctacttcctcaaccaccggtatgagccacgggaagagaaccgacatgctcccggagatcgccgccgccgtaggtttcctcaccagtctcctgaggactcggggctgcgtgagcgagcagagactcaaggttttcagtagggcgctccaggacgcactgaccgatcattacaaacaccactggtttccagaaaagccatccaagggctccggctatcgctgtatccgcatcaaccacaagatggaccccatcatcagcaaggtggccagccagatcggactcagccagccccagctgcaccagctcctgcccagcgagctgaccctgtgggtcgatccctacgaagtgtcctaccgcatcggggaagatggatccatctgcgtgctgtatgaggaggcgccggtggccacctcctacgggctcctcacctgcaagaaccagatgatgctgggcaggagcagtccatcgaagaactacgtgatgactgtctccagctagagaggagccgccccgccctggcactctactgttctcatgctgccctgacaacaggccaccgtatacctcaacctggggaactgtatttttaaagtgaagagctatttatacatgttatttttttttttaagaaaagaggaggaaaaaaaccaaaagtttttttttaaaaaaacaaaaaagaaaaaacaattcgttaacgggagctgcttggaagtggtctccccaggtgcctttggagagaactgttcttgattgagtctatgagccagtgtttgcctaggggagtgggttggggattggcctagccaaggtaaaaggggattcttggctgatcccccaggaggtggtggaagggagcaaggttagcaactgtgaacgagaggggtcagggtctgctctgggttaccgttcccgctgggatgcctgtattcctggtccctctcttactcaggggcattcaagcctggtctcaaataatactacattgcctaatcttctcttttgtttttctgctgagatcctgggcacacggaaaggcctctcctgtcccttccgtctgagcagagtttcttgaaactgtgtctcgtttctgatcctaccctcggggtcctgaagaggtggtttcccggcctagaatctatctaaacgtttttggagggtgggctataaggcagatataatggaggggaaccgcacaaaccctttgctttgctctgtgctgctttgtatggatggatggttaataacttagggatgatttgcaatggaattttgggacccaaagagtatccaatgggggtgggtgttttggacctaagccctccttttgggaaccacgtgacagtctgaatgctgctaccattattcctttgagaggtggctcaaagctccagggaactccaggtcctttcttactgccttctcttcaagagcaacctcccccatttcttttccctctttcctgcggttgggtcctggagggccccatttcctaggacaagagttctcaatcactgtgcaatagtcccaggaagctctggaactgggcctcccagcccctcctgattcctggtgggttttaggaccccgccttccccgttcttctgactggctggtgggccttgaggagatctccctcggccgcagggagggcacctgtgcactgcaggactacctggtactcctgtggggctgccacggagagccaaaccttaggcatagctttgtctcctcggtgctcagagcacctgcagggggaggttgcccccctcagtaaaaatccaaatttatttgtagatgtgtgcaatatttactgttctgggttggagaaaatcgggaaacactgggaagaagtggccttccttcaggttcagtgacactgatgagggcttctcagaaggcctcgagtctctcaaaccaaaggacagagctagagccagccagtcacccttagtgaggatccccttccccatgtctctccactgccgtggcatcccatgtcctggatttctcaattcctcagtttctactcaaaggtgctacttaccaaacactctgcccgtcccgctctccccagcttcgcacagccgtcccaggtggcttcgtctctcctgctttaaagttaactttgggcccacagacccgagagctgtgggttgaagcaaagctgtgaatcgctccagatggtccctgtgttctgtccacacacaggtccccgcctttttagaagcagcctcctggtctcatgcttaaatctgttcctcactgcccgtgttcactttagaaatggcagaaccacagagctggactgttgagcaggcctgtctctctcattaaatagaaataagtaagtttgtaagctattccgacagaagagacaaaggttactgattgtacaatagcgcttttatatggaagactgtacagctttatggacaaatgtaaaacttttttgtttttaataaaaatgtagcagacc

SEQ ID NO: 588 - DNA, 1293 bp, Homo sapiens
ggagcattctgggtagaggtgaaaggccagagtcagaaggaagagttccaaagcaagcttcccaaggaaaatgggcacccagggaaaggtcattacatgcaaggcagccattgcctggaaaactgacagccccctttgcattgaagaaattgaagtttctcctcctaaggctcatgaagttcgaattaaggtaatcgccacatgcgtgtgccctactgacatcaatgccaccaatcctaagaagaaagctctcttcccagtagtcctcggccatgagtgtgcaggaattgtagaaagcgttgggccaggagtgaccaacttcaaaccaggtgacaaagtaatcccattcttcgcaccacagtgcaaaaagtgcaagctctgtctgagtcctctcacgaacctctgtgggaagctcagaaattttaaataccctactattgatcaagagctcatggaagacagaaccagcaggtttaccagcaaagaaagatcaatttaccacttcatgggagtcagttccttctctcagtacactgtggtttcagaagccaatcttgcccgagtggatgatgaggcaaatttggagagagtgtgtctgattggatgtgggttcacatcaggctatggggctgcgatcaacactgccaaggtcacccctggttccgcttgtgctgtctttggcctggggtgtgtaggtctttctgctgtaattggatgtaaaatagcaggtgcttccagaatcatagctattgacatcaacagtgagaagttcccaaaagccaaggccctgggagccactgactgccttaatcccagagacctagacaaacctgtccaagatgtcatcactgaactgacgggtggaggtgtggatttctccctggactgtgcaggaacagctcagaccttgaaagcagctgtagactgcaccgtcgtaggctgggggtcgtgcactgtggtcggagcaaaggttgatgaaatgaatatatccaccgtggacatgatattgggccgttctgtaaagggaacgttctttggtggttggaaaagtgtagactctgtcccaaacctggttactgactacaagaataagaaattcgatctggacttactggtgacccatgccctaccttttgacaaaatcaacgacgcgattgacctgatgaaccaaggaaaaagcatccgaacaatcctgaccttttgaagacgccaggaggaacttggaatgtcatcagattggatccaagcttgtccagatgacttcccacttcccacgatgagccaaggaaagcg

SEQ ID NO: 589 - DNA, 1294 bp, Homo sapiens
ggaattcccggaaaccgttgggcccgagcgaaccgtaccgagcgcgggcatcgcagagcgcgagtgcggagctcggagcgcagcacgatgggaggggagcaggaggaggagcgcttcgacggcatgctgctggccatggcgcagcagcacgagggcggcgtgcaggagcttgtgaacaccttcttcagcttccttcgacgcaaaacagactttttcattggaggagaagaggggatggcagagaagctcatcacacagacttttaaccaccacaaccagctggcacagaaggccaggagagagaagcgagctcggcaggagacagagcgtcgggagaaggcagagcgggcagccaggctggccaaggaggccaaggcagagactcccgggccacagatcaaggaactgactgatgaggaggcagagagactgcagctggagattgaccagaaaaaggatgcagagaaccatgaggtgcagcttaagaacggcagtcttgactctccagggaagcaggatgctgaggaagaggaagacgaggaagacgagaaggacaaaggaaagctgaaacccaacctaggcaatggggctgacctgcccaactaccgctggacccagaccctgtcagagctggatctggcagtgcccttccgagtcagcttccggctgaagggaaaggatgtggtggtggacatccagcggcggcacctccgggtgggcctcaaaggacaggcaccagtgattgatggagagctctacaatgaagtaaaggtggaggagagctcgtggctcatcgaggatggcaaggtggtgacagtgcatctggagaagatcaataagatggagtggtggaaccgcttggttaccagtgaccccgaaatcaataccaagaagattaaccctgagaactccaagctctcagacctggacagtgagactcgcagcatggtggaaaaaatgatgtatgaccagaggcagaagtccatgggcttgcccacctctgatgagcagaagaaacaggaaatcctgaagaagttcatggatcagcacccagagatggatttctccaaggccaaattcaactagctcctgttcaccttcctgaactcttgcagttgagcccgtagccactcaacttcctttcctgagacccaggagccttagggctgggcaggcgtgggacttcccaggcatgtgagctccagggattcactggagaagggctgggtcttgggggtcttgtccttgctatttgtcctgttacacattaaaactatttactctgttccaaagg

SEQ ID NO: 590 - DNA, 2024 bp, Homo sapiens
caatttgctgagcctgtcacctttgttccaggagccaaaccagcaatgtcttcccctgcacagcctgcagttcctgccccactggccaacttgaagattcaacacaccaagatctttataaacaatgaatggcacaactcattgaatggcaagaaatttcctgtcattaaccctgcaactgaagaggtcatctgccatgtggaagaaggggacaaggcagatgttgacaaagctgtgaaggctgcaagacaggctttccagattggctccccctggcgcaccatggatgcttcagagagaggatgcctgctgaacaagctggctgacttaatggagagagatcgcgtgctgctggctacaatggaatcaatgaatgctggaaaaatctttactcatgcataccttttggatacagaggtcagcataaaagccttaaagtactttgcaggctgggcagacaagattcatggccaaacaattccaagtgatggagatgttttcacttatacaagacgtgaacctattggggtgtgtggccaaatcattccttggaatggtccgttgattttattcatttggaagataggcgctgcccttagctgtgggaacactgtgattgtgaagccagcagagcaaactcctctcacagctctttacatggcatctttaataaaagaggcagggtttcctcctggtgtggtgaacgttgtccctggttatggatcaactgcaggggcagccatctcttctcacatggacatagacaaggtgtctttcacaggatcaacagaggttggcaaattaatcaaagaagctgcagggaaaagcaatctgaagagggtcaccctggagcttgggggaaagagcccttgcattgtgtttgcagatgctgacttggatagtgctgttgagtttgcacaccaaggagtattcttccaccagggtcagatttgtgtcgcagcatccagactttttgttgaggagtccatttacgatgaatttgttaggaggagtgtggagcgggctaagaaatacgttctaggaaatcctctggactcaggaataagtcaaggtcctcagattgacaaggagcaacatgctaaaatccttgatctcattgagagtgggaagaaagaaggcgccaaactggagtgtggtggaggacgctgggggaacaaaggcttctttgtccagcctacagtcttctccaatgtgaccgatgagatgcgcattgccaaagaggagatatttggaccagtgcaacaaatcatgaagtttaagtccatagatgaggtgatcaagagagccaacaatactccctatggtctagcagcaggagtcttcacaaaagacctggacagggccatcactgtgtcttctgctctgcaggccgggacagtgtgggtgaattgttatttgactctctctgtccagtgcccatttggtgggttcaagatgtctggaaatgggcgagaaatgggtgaacagggtgtttatgaatacactgagctcaagacagtcgcaatgaaaatatctcagaagaactcctaaagaagccagcagagtgacgagaaactctcagcagtagctacatgtctcctacaatcaccagcagagggttgttttattacagggtcttctgttgatttcttaaacataaggaatccatcagcattactgtaactcatagaaaatgtatagtttaattcttctaatacatgaccctaatacatacccaagaagaaagggatacatttaggtacatgctctttgtaacccagtcatgaaaaagtgcttttcattgtagctacttgtctacagccctcatttgatgtgatttaaactctgtttctcggtgacttcttgccactactcaccatgcacaactgaaaagtcagccactgttcttggagttattgttctgagtattgtgaaatatttttagaatgacatacctgcttgtcaaatgaaatgcttagctgtaattagagtgcaaagtttaataaaggcaaaatctcacatga

SEQ ID NO: 591 - DNA, 852 bp, Homo sapiens
gtaaagatggcagaacgcggttacagcttctcgctgactacattcagcccatctggtaaacttgtgcagattgaatatgctttggccgctgtagctggaggggccccttcagtgggaattaaagctgcaaatggcgtggtattagccactgagaaaaagcagaaatccatcctgtatgatgagaggagtgtacacaaagtggagcccataaccaagcacatcggtttggtgtacagcggcatgggtccagattacagagtccttgtacacagagctcggaaacttgctcagcagtactaccttgtttaccaagaacccattcccacagcccaactggtacagcgagtagcgtctgtgatgcaagagtatacccagtcaggtggtgttcgtccatttggtgtttctttacttatttgtgggtggaatgagggacgaccatatttatttcagtcagatccatctggagcttactttgcctggaaggccacagcaatgggaaagaactacgtgaacgggaaaactttccttgagaaaagatataatgaagacttagaactggaagatgcgattcacacagccatcttaacccttaaggaaagctttgaagggcagatgacagaagataacatagaagttgggatctgcaatgaagctggctttaggaggctcaccccaactgaagtgagggattacttggctgctatagcgtaatgaagatgtgccggaacaacaaggaacactcattctacttattcatttttaaagtatgttttgtttgtgcagacttatttctacatgctttaatggatttcacatttttaaataataatcataataaactgttaaaaccag

SEQ ID NO: 592 - DNA, 852 bp, Homo sapiens; identical to SEQ ID NO: 591

SEQ ID NO: 593 - DNA, 1993 bp, Homo sapiens
ccatgagctccattggcactgggtatgacctgtcagcctctacattctctcctgatggaagagttttccaagttgaatatgctatgaaggctgtggaaaacagtagtacagctattgggatcagatgtaaagatggtgttgtgtttggggtagaaaaactagtcctttctaaactttatgaagaaggctccaataaacgtcttttcaatgttgatcgacatgttggaatggcagtggcaggtttgttggcagatgctcgttccttggcagacatagcaagagaagaagcgtccaactttaggtctaactttggctataacattcctctaaaacatcttgcagacagagtggccatgtatgtacacgcgtatacactctacagtgctgttagaccttttggctgcagtttcatgttggggtcttacagtgtgaatgatggtgcacagctctatatgatcgatccatcaggtgtttcatatggttactggggctgtgccattggcaaagccaggcaagctgcaaagacagaaatagaaaagcttcagatgaaggaaatgacctgccgtgatgtagttaaagaagttgcaaaaataatttacatagtacatgatgaagttaaggataaagcttttgaactagagctcagctgggttggtgaattaactaaaggaagacatgaaattgttcccaaagacgtaagagaggaagcagagaaatatgccaaggaatctttgaaggaagaagatgaatcagatgacgacaatatgtaacatttcaccatcctctggtgtccatttctgtgacagttgcatatggctagcaccatggattatatatacccactgaccaattttcattaaattttgtcttataaacattgttgggtaattgaggatatctgcgttatattaaaatgtagattcatgtttgattagaaattctaggaactgggcctggagagatggctcagcagttaagagctgctcttccaggggacataggttcaattcccagcacccgcatggcagctcacacctgtttgtaactctagctccaggtctctgacacctagacacagaggtacttgcaggcaaaacaccaatgaatataaaataaaaataaatgatatatatatttacacatataacaagtatatacaaatatgtatattatacagacacatgtgtgtgtatatacatataaattcttggtgctattctggtgtggtagtatatgtctttaatcctagtactctggaggcagaggcaggtggatctcttgagttcaaggctagtatttaaaaacaaaaacaaatgtagtgcccagactaaggctgaaagattgagcccacaagtcaatttacaattccattttgttttaactagaattaaaagaataattttagattttttttttctttttttcagagctggggaccgaacccagggccttgcgcttcctaggcaagcgctctaccactaagctaaatccccaaccccttagatttatttttattttttgcatgtttatgtatattacagtgccatgcctggtgctcatggaggtcaaaagaatgctttaatctagaactaaagttatggaggactgtgaatcatgtatgttcgaaactgaacttgggtcctgtgtaagagcaacacgtcctcttaaccactgagccatctctccagccctctttgactagaatgatcatattctactgtggttcttgtataatgttttgtttaatgtagggatatcctgtaaccactattgaggactaacctgccttttgtggaaaatgtgacatattctaatttgacatcaatacagacaacatttattttcagactgcataaatatcttatgactggaaattatcttgatattggcacctgaaacaaaaacttaaaagttccaaactgggcttaaatatttcatgtaataaaatgtttatagtacttatctgaaaaaaaaaaaaaaaaaaaaaaaaaaa

SEQ ID NO: 594 - DNA, 1121 bp, Homo sapiens
cttggccatccgggttggttcttctccagctgagtaaagcggcgctgatctgcaccctcactgtcttcctccggatccacataaaattcagaagccatgtctcgaagatatgactccaggaccacaatattttctccagaaggtcgcttataccaagtggaatatgccatggaagccattggacacgcaggcacttgtttgggaattttagccaatgatggcgttctgcttgcagcagagaggcgcaacatccacaagcttcttgatgaagtctttttttctgagaaaatttataaacttaacgaggacatggcttgcagtgtggcaggcataacatctgatgccaacgttctgactaatgaactcaggctcattgctcaaaggtacttattacagtatcaggagccaattccctgtgagcagttggttacagcactgtgtgatatcaaacaggcgtacacacagtttggaggcaaacgtccctttggtgtttctttgctgtatattggctgggataagcactatggctttcagctctatcagagtgacccaagtggaaactacgggggatggaaagccacatgcattggaaacaacagtgctgcagcggtatcaatgctgaaacaagactacaaagaaggagaaatgactctgaagtcagcgctggctctggctgtcaaggtgctaaacaagacaatggatgttagtaaactgtcagctgaaaaagtggaaatcgccacactaacaagagagaatggaaagaccgtgatcagagtcctcaagcaaaaggaagtggaacagttgatcaaaaaacatgaagaggaagaagcgaaagctgaacgggagaagaaagaaaaagaacagagagaaaaggataaatagacagaatcatggattttataactccttagaggcgccagttcacttaggagctgtcctggccttcccctggaagtgttttcttgtattttcttccttaccttggccatcggggaaatgggacattgcatactgaattgggtccatgtctgtccagctggatgctttattgtaatgatggacatctttataaacatcttaatctcgacacataatttttggaataaaacctggaaagattg

SEQ ID NO: 595 - DNA, 970 bp, Homo sapiens
gcggtgtggttgagtagggtgctgctttcagtcgtgtggcctttggaactccgcgtagcactgccgcctcctcctgtcctcgccatgttcctcactcggtccgagtacgacaggggtgtgaacactttttctcctgaaggaagattatttcaagtggaatatgccattgagggccataagcttggttctacggccattggcatccagacatcagagggtgtatgtctagctgtggagaagagaattacctcgccactaatggagcctagcagcattgagaaaatcgtagagattgatgctcatataggttgtgccatgagtgggctaattgctgatgctaaaactttaattgataaagccagagtggagacacagaaccactggttcacctataatgagacaatgacagttgagagtgttacccaggctgtgtccaatctggctttgcagttcggagaagaagatgcagatccaggtgctatgtctcgtccctttggagtagcattgttgtttggaggagttgatgagaaagggccccaactgtttcacatggacccatctgggaccttcgtacagtgtgatgctcgagcaattggttctgcgtcagagggtgcccagagctccttgcaggaagtttaccacaagtctacgactctgaaggaggccatcaagtcttcactcatcatcctcaagcaagtcatggaggagaagctgaacgcaactaacatcgagctggccacagtgcagcctggtcagaatttccacatgttcacaaaggaagaactggaggaggtgatcaaggacatttaaggaggggccatcctcgaacttctgtgggacagtttcagttctaatggctcttagactttatttccaactccacgtcgtgaaaatatccagtatatgtatgtgtgtttttttatgatgtctgtacataacagcaattctgaaataaaaaaaatttacaaat

SEQ ID NO: 596 - DNA, 970 bp, Homo sapiens; identical to SEQ ID NO: 595

SEQ ID NO: 597 - DNA, 5648 bp, Homo sapiens
cggagccgtccccgacgccacctcccgtctcctccgccgcagtttcctccgccgctgtcgggggtgcagagctgaggggctcgggcagcgcgccgcgcagctcctctccagtcgcccgcctcgccgtcctccccaccgagggctcgcccgggcgcccctcctcagccgcgccgggtctcctcgcgcagcgccgcggcctgcgctacctgcggccggctggcaacagaggcaacgcacactcgcggcggggcgggaggctcgcagcccctcgggcgggctcggcgaggcccggccgcgtgcggcggtttctgggggagggggctcgggtgattcagcgcccggtcaggcggaagcggccgccgccgcggaggaggaggagaaagaggaggggacagctgtccgcgcccgggcgcccgcggtggcacgagcccgcggcccgagtgcgaggcggaggcgaggaggccgcggggacgcgaggcgaggccggccggggcccccgcagccatggagaacgctcacacaaagaccgtggaggaggtgctgggccacttcggcgtcaacgagagcacggggctgagcctggagcaggtcaagaagctcaaggagagatggggctccaacgaattgccggctgaagaaggaaagaccttgctggaacttgtgatcgagcagtttgaagacttactagttagaattttattgctggcagcatgtatatctttcgttttggcttggttcgaagaaggtgaagaaacgattacagcctttgtagaaccttttgtaattctgcttatattggtagccaatgcaattgtgggtgtatggcaggagagaaacgctgaaaatgcaatagaagctcttaaggagtatgaacctgaaatgggcaaggtgtatcgacaggacagaaagagtgtgcagcggattaaagcgaaagatatagttcctggggatatagtggaaattgctgttggtgacaaagttccggctgacattagattgacatccatcaagtctacaactctgagagttgaccagtcgattcttacaggtgaatctgtctcggtcatcaagcatactgaccccgtccctgacccacgagctgttaatcaagacaaaaagaacatgctcttttctggcacaaacatcgctgctggcaaagctatgggagtggtggtggcgactggagtcaatactgagatcggcaagatccgggatgaaatggttgcaacagaacaggagagaacacccctacagcagaagctggacgagtttggggaacagctttccaaagttatctccctcatttgcattgcagtctggatcatcaacatcgggcatttcaatgacccagttcatggtggctcttggatcagaggtgccatctactactttaagattgcagtggccctggctgttgctgccatccctgagggtctgcctgctgtcatcaccacctgcttggctcttggaactcgaaggatggcaaagaaaaatgctattgttcgaagtctgccttctgtggaaacccttggttgtacttctgttatctgctcagacaagaccggcacacttaccacaaaccagatgtccgtctgcaggatgttcattctggacaaagtagaaggtgatacttgttcccttaatgagtttaccataactggatcaacctatgcacccattggagaagtgcaaaaagatgacaagccagtgaaatgccatcagtatgacgggcttgtagagttagcaacgatctgtgctctgtgtaatgactctgctttggattacaatgaggcgaagggtgtgtatgaaaaagttggagaagccacagagactgctctcacgtgcctggtagagaagatgaatgtattcgacacggagctgaagggactttctaaaatagaacgcgccaacgcctgcaactcggtcataaaacagcttatgaagaaggaattcacgctagagttttcacgtgatagaaaatcaatgtccgtctactgtacaccaaacaaaccgagccggacgtccatgagcaagatgtttgtgaagggtgctccagaaggtgtcatcgacaggtgcacccacatccgagttggaagtaccaaggtccccatgacgcctggtgttaaacagaagattatgtctgtcattcgggagtggggcagtggcagcgacacactgcggtgcctggctctggccactcatgacaacccgctgaggagagaggagatgcacctggaagattctgcgaacttcatcaaatatgagaccaatctgactttcgttggctgtgtgggcatgctggaccctcccaggattgaagtggcctcttctgtgaagctgtgccggcaagcgggcatccgagtcatcatgatcactggggataacaaaggcactgctgtggccatctgtcgccgcattggcatctttgggcaggatgaggatgtgacatcaaaggcttttacagggcgagaatttgatgaattaagcccctcagcccagagagacgcctgcttaaatgcccgttgttttgctcgagttgaaccttcccacaagtctaagatcgttgagttcctgcagtcctttgatgagatcacagctatgactggtgatggtgtgaacgacgcgcccgctctgaagaagtcggaaatcgggattgccatgggctcagggactgcagtggctaagacggcctctgagatggtgctggccgacgacaacttctccaccatcgtggccgctgttgaggaggggcgcgccatctacaacaacatgaagcagttcatccgctacctcatctcctccaacgtgggggaggtggtctgtatcttcctgacggcagcccttgggtttcctgaggctttgattcctgtccagttactctgggtcaatctggtgacggatggtctgcctgccactgcgctggggttcaatcctccagatctggacatcatgaacaaacccccacggaacccaaaagaaccgctgatcagcgggtggctctttttccgttacctggctattggctgttatgttggcgctgccaccgtgggtgctgctgcgtggtggttcatcgctgctgacggtggtccgagagtctccttctaccagctgagtcatttcctgcagtgtaaggaggacaacccagacttcgaaggagtggattgtgcaatctttgagtccccgtatccgatgacaatggcactttctgttctagtcaccatagagatgtgcaatgccctcaacagcttgtctgaaaaccagtccctgctgaggatgcccccctgggagaacatctggctcgtgggctccatctgcttgtccatgtcccttcacttcttgatcctctacgtggaacctttgccactcattttccagatcacaccgctgaatctgacccagtggctgatggtgctgaaaatctccctgcctgtgatcctcatggacgagacgctcaagtttgtggcccgaaactacctggagcctggtaaagagtgtgcgcagcctgccaccaaaccctcctgctccctgtcggcatgcaccgacggcatttcctggccctttgtgctgctcattatgcccctggtggtctgggtctacagcacagacactaactttagtgatatgttctggtcttgactgacagcgctacatgcagaagatgtttaacttaatcaattaattttttattgtttaaagcaactgtctatttctgctgaattttcacatgaacatattggctggtgaaggaggtttcatatctagattttgttttgctttttctgactccagtgggacaagattttccttttttttatacacataattaaagtgtccattgacatgtacagagaactaacactattttatgcagatatttttttgtagatgaaaaaagcatgtacagtgttctgtttcatactcatacttgtacaaagatcgttgagccagcagacattgtcagcaagttaattggcagcagacttaggaaatgaatgtgtgtggtttttaaaagaaaaaaaactaaatagcatgtattgtgtcttttgcatgattctctggatttaatttggtatcacagtctaatttttattcataagccaatttttctgcactgagcagagtcctgctacctcagtcagtatttttggtttgccactccctgcaccctcagcctctgtcacccccagcccaccctggcccgctcggctgcttctgtaggtctgatggttctgtttacatctgtcttcacgaggtttgcctgtctcgcttgtgcagaaaacattgctccagatccaatcgactgggtttctgtcccttcgcctagtttttaaggttatttatttaaatgtctaatgtattttattgtaacagacattgttttgccaacattgcctattcagtggcacttcacaatctagtttaaaagaaaaataaaacattttaaatggacagaggaaaataactgtcttgttcttaatggccttgaactacccatgatcagttcaaattcctgagcttctcagctcggagccttagtttcctgttcctgagaagaacgtgtactgctgcacagtagggattatctataatgtacaggcacgatcgtcatgtgacaaacatttactcaagtttctgctggcctggtgtatgtaggctggtgtaagggcaagtgtgtgtgtgtatgtgtgtgtgtgttctgtaaaatctgtaaatagcacatgaccaaatgaactgtatagaaatatttttatttgaatatggcactaaccaccaccaccatgactgaccggacgtttgcgcatgttcaaggtcagtcttaacggcagtgtgagtcattaacagtcctaactgtggtgttttcctccaatgccttccaacatccatcaactaaccaatactggagtaaccgcttcctaaacattgcagaaatgtaagggtgttcgggtgcgtgcatgtgcgttgttagcaacacatcttccagccctctgcatgactgagcttggggaaagagaaatagaacagcccccagctcactgtgtgatgtggaggaaatgtgtattacaagtggggttttagctgttgagtcaaaataataacaagtgtacaatttagcataaggaatcggagagcctctccagagaagtcggtttctttgctgcaagaagaatgaggttctgaacccttatccaagaacagaagccatcagccaagtctccacatttctctgcaaaatgttgtagcctctataactgtatgatagtgtaatgcatgccttcagttgtaagtggccagatcgcgctacagtgacattgaaacctgctctctaattggccctgtacagtttgcttatttataaattcatttaaaacactacagctgttgaatggttacaacctaggcctccggtcctaacttcagttgttctcctcggtgtgcagccagctgttccacactgtattattgtaacttatttagtgaagtcagaagcagtagacagatgttggtgcaatacaagtattgtgtgcatttatcgtaataaagtgctccgcgtcggttcagttcctcacagcttctcacagtgcatgtctgactgtagtctgtaaatagaggtcagtgtccgtgctgctaacaggtatcgatcgcacaga

SEQ ID NO: 598 - DNA, 972 bp, Homo sapiens
cccaccgatatccaaaatggcgctggctgctgcgcgtcgcgttctgctgcaggccggatcccgcctcggccgcaggggggccgtggacggcgcgcgtcgcttctctaacaagcgggtgttggtggagaaggagggcgaggcaggaatcgcagtgatgaagttcaagaaccctccagtgaattccctcagcttggagtttctgacagagttcgtcatcagcctggagaagctggaaaatgacaagagcatccgaggtgtcatcctcacttcggagcgcccgggtatcttctcggctggcctggacttgatggagatgtatggccggaacccagcccactatgctgagtactggaaggctgtgcaggagctgtggctgaggctctacttgtccaacctgaccttgatatctgccatcaatggcgcctctccagctggaggctgcctcatggctctcacctgtgactacaggataatggcggacaactccaagtataccataggattgaatgagagcctgctgggcattgttgcccccttctggttaaaagacaactacgtgaacaccatcgggcaccgagcagccgagcgtgcccttcaactggggacgcttttcccaccagcagaggccctcaaggtgggtttggtggatgaggtggtacctgaggatcaggtacacagcaaggctcgctcagtgatggccaagtggttcaccattccggaccattctcggcagctgacgaagagcatgatgcggaaggccacggcggacaacctgatcaagcagcgagaggctgacatccagaacttcaccagtttcatctccagagactccatccagaagtccctgcacgtgtacttggaaaagctcaagcaaaagaagggctgacctaagggtgccacacgggtgtttagttacacgtgccttctaggacccatggtcccaaggattatcaataaggtatttttcaattt

SEQ ID NO: 599 - DNA, 972 bp, Homo sapiens; identical to SEQ ID NO: 598

SEQ ID NO: 600 - DNA, 3741 bp, Homo sapiens
acacgggtcgttgctttggtgtctgtcacttctgtcgccacctcctctgccaacaccaacactgacctccgtcatgaaccccgacctgcgcaaggagcgggcctccgccaccttcaatccggagttgatcacgcacatcttggatggcagtccggagaatacccggcgccgtcgagaaattgagaacttgattctgaacgacccagacttccagcatgaggactataacttcctcactcgaagccagcgttatgaggtggctgttaagaagagtgccaccatggtgaagaagatgagggaatatggcatctcggaccctgaagaaatcatgtggtttaaaaaactatatttggccaattttgtggaacctgttggcctcaattactccatgtttattcctaccttgctgaatcagggcaccactgctcagcaggagaaatggatgcgcccgtcccaagaactccagataattggcacctacgcccagacggagatgggccacggaactcatcttcgaggcttggaaaccactgccacatatgaccccaagacccaagagttcattctcaacagccctactgtgacttccattaagtggtggcctgggggacttgggaaaacttccaatcacgcaatagttctggctcagctcatcactcaaggagagtgctacgggttacatgcctttgttgtccctatccgtgaaattgggacccacaagcccttgccaggcatcactgtcggggatatcggtcccaaatttggttatgaagagatggataacggctacctgaagatggacaattaccgtattcccagagagaacatgctgatgaaatacgcccaggtgaagcctgatggcacatatgtaaagcctttgagtaacaagctgacgtatgggaccatggtttttgtgaggtccttcctcgtgggaaatgcagctcagagtctgtccaaggcttgcacaatcgccatacgatacagcgctgtgaggcgccagtctgaaatcaagcaaagcgaaccagaaccacagattttggattttcaaacccagcagtataaactcttcccgctcctggccactgcctatgccttccacttcgtaggaaggtacatgaaggagacctaccttcgaattaatgagagcattggccaaggggacctgagtgaactgcctgagcttcacgccctcactgctgggctgaaggcttttactacttggacagccaatgctggcatcgaagaatgtcgaatggcctgcggcgggcacggctattctcacagcagtgggattccaaatatttacgtcacttttaccccggcctgcaccttcgagggagagaacactgttatgatgctgcagacagccaggttcttgatgaaaatctatgaccaggtgcggtcggggaagttggtgggtggtatggtgtcatacctgaatgacctgccgagtcagcggatccagccacagcaggtggcagtctggccaactatggtggacatcaacagcctggagggcctgacagaagcctacaagcttcgtgcagccagattggtagaaatcgctgcaaaaaaccttcagactcacgtgagtcacaggaagagcaaggaagtagcatggaacctaacctctgtcgaccttgttcgggcaagtgaggcgcattgccactacgtggtcgttaaggtcttctcagacaaactccccaagattcaagacaaagccgtccaagctgtgctgaggaacctgtgtctcttgtattctctctatgggatcagccagaaaggaggggactttcttgaggggagcatcatcacaggggctcagctgtcacaagtaaacgctcggatcctggagctgctcaccctgatccgccccaatgctgttgctctggtggatgcctttgactttaaggacatgacacttggctctgttcttggccgctatgatggaaatgtgtatgaaaacttgtttgagtgggccaagaaatccccactgaacaaaacagaggtccatgaatcttaccacaagcacttgaagcccctgcagtccaagctttgaagtttccctgggacacgtctgagctccacaagcagcagaaactctctcctctactcactaatccttgtgaaatcgtcatcaaatttgtgtagctacagagcaaatgatgggtttcttttcctccctataagtaaagagaaatgaacagactttagagattaaatgagaaattcggtgttgtaagtgcagtaatgcagacagagacgtaggaactcagaaagcttcagagctgtggtctgacttgcatttgtactgctgctaatctcagtaggccttgactctggagaattaacagagttttaactacaaatacttacttattttcacatttttactgctaatcactggatatatgttttttaaacaaaagtgttatatagagtggaattttccaggcattcgtgcctaccactttctgatctactgctaagagcaggagtttgggggccagaaactaatagaaaccttgatgtgggtgtgtggctgtcacacaggccgctgctgcctgccatgtgggtgtgtcacccctattaactgtcacattaacatagtcaacaagaggactccttcaacacccacccaccaagaaaccagagttcccgatgggcacaagcacccactccaggctcagccttcgtggtagtggcactactgtgcctttgaccccactttttgacacagttaagttacttgtcttacctccaggctttcagccattgcctggatttcagtcatggtggctgaccttccctttcttgcttgccttccttctcctgaaagagataaaagagatagtagtcagcctctcctcatagattaagtatatggagagccctcagctatggtattactgtattttggtgactttgttaagtaaatttcctgggacaatcctgatttgaaagattctgtattctgttgcacaagctattaaaatgctcagtggtcaccaaagtatttcacacacacacactcacaaatcactcaggtcaccttttacactagaaataacaggaaagccctggccacagccatctgctgagagtgttagttgagatgtttcgttgaagatggctgaagaaagtgcaggccctggggagtttctccttgctgagagccggctctgtggtgagcccctagcagccttacgaggcggtgaaacggccccttcagatgggagcagcctctacaatcattctgagcttaaaggtgaaatatgcaccttttgtcctataaatgtcctataaatgcttggggggaggggtaatgttttgttttttttttcttgaaacagagcccagaatggccttgaactctgatcctcacagcctggtaaatgctgggcctacaggtgtgcgccgacatgtctggctgatcggagctctttattcttaaaagcacagtagggagatgattgtaacattaagtctgtgtctgtggcattcgcattgtgagagcagttccttagaacagttctgagagcacagcatcaatgtagtgaaaacgatgtcgacgcctgacatgaaatcacaaccctccgggtcatcgacacaagccttaacctttctcctggaatgactggtaatcccttaagattgacagtacacagcatgtcaccttgttggggtttctattgacagtaattcatattctggaaaggaactaataaatataaatgaccg

SEQ ID NO: 601 - DNA, 3741 bp, Homo sapiens; identical to SEQ ID NO: 600

SEQ ID NO: 602 - DNA, 2783 bp, Homo sapiens
ctcagcaatggtgactctgtggtggccctgccttgtcttggctctgctctctggcttggagacctctggctttccaaggagtcccctccggctgcttgggaaacggagccttccagaaggggtggtggatggcattgagatctacagcaccaagatcagctgcaaggtgacctcccgctttgctcacaatgttgtcaccacaagggctgtcaaccgtgcagacaaggccaaggaagtttcctttgatgtggaactgcccaagacagccttcatcaccaacttcaccttgactattgatggtgtcacctaccctgggagtgtcaaggagaaggaagttgcgcagaaacaatatgaaaaggctgtgtcccagggcaagacagccggtttggtcaaggcctccgggaggaagctggagaagttcacagtgtctgtcaatgtggccgcaggcagcaaggtcatctttgagctgacctatgaagagctgctcaagagaaacaagggaaagtacgagatgtaccttaaggtccagcccaagcagctcgtcagacactttgagatcgacgcacacatttttgagccacagggcatcagcatgttggacgccgatgcctcatttatcactaatgacctcctgggaagtgccctcaccaagtccttctcagggaaaaaggggcatgtgtctttcaagcccagcttagaccagcagcgctcatgcccaacctgtacggactcccttctcaacggggacttcaccatcgtctatgatgtgaacagagagtctccaggaaatgtgcagatagtcaatggctacttcgtgcacttctttgcaccccaaggcctcccagtggtgcctaagaacatagcctttgtgattgacgtcagtggctccatgtctggtcggaaaatccagcagaccagggaagcccttctcaaaatcctggatgatatgaaggaagaggactatctgaatttcatcctcttcagcactggtgtgaccacctggaaagatcacctagtcaaggccacacctgcaaacctcgaggaggccagggcgtttgtgaagaacatccgtgatcgaagcatgaccaacatcaatgacgggctgctgaggggtattgaaatgctgaacaaggcccgagaagaccaccttgtcccggagaggagcacctccatcctcgtcatgttgacagatggggatgctaatactggcgagagcagacctgaaaagatccaggaaaacgtccggaacgccatcaggggcaagttccctttgtataacctgggttttggcaacaatctgaattataatttcctggagtctctggccctggagaaccacgggtttgcccggcgtatttatgaagattctgatgccagcttacagctgcagggcttctacgaggaagtagctaatcccttgttgactaatgtggagttagaataccctgagaatgccatcctggacctcaccagaaacagttacccccacttctatgatggctctgagattgttgtagcagggcgtctggtggacaggaacgtggacaacttcaaagcagatgtgaagggtcatggggccctgaatgacctgaccttcacagaggaggtagacatgaaggaaatggacgcggccctgaaggagcaaggctacatctttggggactacattgagcggctctgggcctacctcactattgagcagttactggagaaacgcaagaatgcccgtggggatgagaaggagaacatcacagcagaggccctggagctgtccctcaagtaccactttgtaactccactgacctccatggtggtgaccaagcctgaggacaacgaggaccaaacagccattgctgacaagcctggggaagaagccatctctgcgtccacggcctacctgaccagtcagcagtccagccatagcccctactattatgtggatggggacccccacttcatcatccaagtcccgggaaaaaatgacaccatctgcttcaacatcgatgagaagcctggcacggtgctgagccttattcaagacccagtcacaggcatcgcagtgaccgggcagatcattggagagaagggaaataatgcttcttccaggacagggaaaacttactttggcaaactgggcattgccaatgcttggatggactttcggattgaggtgaccacggagaagatcatcctggggaacggggatgcactgagcacgttcagttggctagacaccgtcacggtcacacagacagggctgtctgtgacaatcaacaggaaaaagaatatggtggtgtccttcgaagatgggattagctttgtgatcgtcctacaccaggtttggaagaaacatccggttcaccaggacttcctagggttctacgtggtggacagtcaccggatgtcagcacagacacatgggctgctgggccagttcttccaaccctttgactttaaagtgtttgacgtccgcccaggctctgaccccatgaagccagacgccacaatggtggtgaagagtcatcggttgacagtcacaaggggctcccaaaaagattacaggaaggatgccagtgtcggcaccaaggtcgtctgctggtttgtccataacaatggggaagggttcatcgacggtgtccacaccgactatattgtccccagcttgttctgagtacacatgccagctgctgctgcagtagaaggcctggaacaggacacagaatggggctcgtgggaaggactgggacaataaagtgggtaaaccaaaaaaaaaaaaaaaaaaa

SEQ ID NO: 603 - DNA, 3465 bp, Homo sapiens
acgctgcttccccgcccatccccgttctccaggccgcccactggccatggcgcagccgggcccggctccccagcctgacgtttctcttcagcaacgggtagcagaattggaaaaaattaatgcagaatttttacgtgcacagcagcagcttgagcaagaatttaatcaaaagagagcaaaatttaaggagctgtatttggctaaagaggaggatctgaagcggcaaaatgcagtattgcaagctgcgcaggatgacttgggtcaccttcggacacagctgtgggaggcgcaggcagaaatggagaatatcaaggcgatcgccacagtctctgagaacactaagcaagaagctatagatgaagttaaaaggcagtggagagaagaagttgcttcacttcaggctgtaatgaaagagactgtgcgtgactatgagcatcagtttcacctgaggctggagcaggaacgagcgcagtgggcacagtatcgagagtctgcagaccgggagatagctgacctaagaagaaggttgtctgaaggtcaagaggaagaaaatttagaaaatgaaatgaaaaaggcccaagaggatgccgagaagcttcgctctgtcgtgatgcccatggagaaggaaattgcagccctgaaagataaactgacagaagctgaagacaagattaaagagctggaggcctcaaaggttaaggaactgaatcattatctggaggccgagaagtcttgcaggactgatctggagatgtatgtagctgttttgaacacccagaaatctgttctacaggaagatgctgagaaattgaggaaagaactgcatgaagtttgccatctcttggagcaagagcgacaacaacacaaccagttaaaacacacgtggcagaaggccaacgaccagtttttggaatctcagcgcttgctgatgagagacatgcagcgaatggagatcgtgttaacttcagaacagctacgacaagttgaagaactgaagaagaaagatcaggaggaggatgaacaacaaaggatcaataagggaaaagataacaagaaaatagacactgaagaagaagtaaaaataccagtagtatgtgctttaactcaagaagaatcttcaaccccactatcaaatgaagaggagcatttagacagcacccatgggtcagtccattccttagatgcagacttgctgttaccatctggagatccattcagtaaatcggacaatgacatgtttaaagagggactccggagagctcagtctacagacagcttgggaacctcaagctcattgcaatccaaagctttaggctataactacaaagcaaaatctgctggaaatttggatgagtcggattttggaccactggttggagcagattctgtgtctgagaactttgatactgtgtcccttgggtcactgcagatgccaagtggatttatgttaaccaaagatcaagaaagagcaattaaggcaatgacacctgaacaggaggagacagcatccctcctctcaagtgtcacacagggtatggagagtgcatatgtctctcctagtggttaccgcttagtgagtgaaacggaatggaatctcctgcagaaagaggtacataatgctggaaataagcttggtagacgttgtgatatgtgttccaattatgaaaaacagttacaaggaattcagattcaggaagctgagacaagagaccaggtgaaaaaactgcagttaatgctcaggcaagctaatgaccagctagagaagacaatgaaagagaaacaggagctagaggacttcctcaggcagagtgccgaggactcaagccaccagatatctgcacttgttttaagagcccaagcctctgaggtattacttgaagagttacaacagagtttttcccaagcaaagagggatgttcaggagcagatggcagtgctgatgcagtcacgtgaacaggtctcagaagagctggtgaggttacagaaagacaatgacagcctccagggaaagcatagcttgcatgtgtcattacaactagcagaagacttcattcttccagatactgtgcaggtgctccgggaactggttttaaaatatcgtgagaacattgttcatgtgcggacagcagcagaccacatggaagagaagctgaaggctgaaatactttttctaaaagagcaaattcaggcggaacagtgtttaaaagaaaaccttgaagagacattacagctggaaattgaaaactgcaaggaggaaatagcttccatttctagtctaaaagctgaattagaaagaataaaagttgaaaagggacagttggaatctacattaagagagaagtcgcaacaacttgagagcctccaagaaataaaagttaatttagaggaacagttaaagaaggaaactgctgctaaggccactgttgaacagctcatgtttgaagagaagaacaaagctcagaggttgcagacagaattagatgtcagtgaacaagtccagagagattttgtaaaactttctcagactcttcaggtgcagttagagaggatccggcaagcagactccctggagaggatccgggcaattctgaatgataccaaactgacagacattaaccagctccctgagacatgacaccctgatggcaggattctgacctgcattttgggtttttaactcatctttagaataacattaattattatttaactcttaatggaagaagtcacagcaaaaggaggactggagaaatgcagttctggagggagaaggctgctgtgtgcagggacagccaacagacgtttcaaagggaacactaatgagacactggactcgattccaacaggcgtgggatcagattgggtgccagaaaagtgctgtttccttgcctgcttcctccagcgtggactctggaacataattcctgccatgaaagcaacttcccaatagtgtttggaattacgttttctgttcatacaaactgggagagaaaagtttctttctcctgtggtctggggctcatcagtagcagtgttcagctagcagagaggtgtagtgcgctgtgtgagtattttatattaaaatgtggagtgagagcaggccattggctattgattgtgtttcccttgttcaatgcattttgtttcctttttaaccattccttctattggaagaccttaaatgctattgtaacttgcttgagaactataggaccatggcaaacaaaagcaattaaaattaggagaatctgaatctttggctgaggccaatatatattatatatatatcaatttatggaaaaaaagcacaaataaccttggaagcactttgtctgcacaccatgatgaacttcctgggcccaaaggtaccagggcaaataactggcaccatctaccctttcgaagtgttttagttactggatcagtggaaaataatactaataaaacaagctatctcttacatct

SEQ ID NO: 604 - DNA, 6040 bp, Homo sapiens
cggcccgccaggcagctccggccgtgcgcgcacgccgagccgccggagcccgggccgacccgtgccggagcagcatgcggagcccgcagccgctgctcctctggacacctcagcctgaggcctctccgtgagttacggggacaccatcccccaccagggcggaggctggaggccactgccaagcatggcgcccacctggagacccagcgtggtgtctgtggtgggtcctgtggggctcttccttgtactgctggccagagggtgcttggctgaagagccacccagatttatcagagagcccaaggatcagattggtgtgtcaggaggcgtggcctccttcgtgtgccaggccacaggtgaccctaagccacgggtgacctggaacaagaagggcaagaaagtgaactcacagcgctttgagaccattgactttgacgagagctcgggggccgtgctgaggatccagccacttcggacaccccgggatgagaacgtgtacgagtgtgtggcccagaactcggtgggggagatcacagttcatgcgaagctcaccgtcctgcgagaggaccagctgcctcctggcttccccaacattgacatgggcccccagttgaaggttgtagagcgcacacgcacagccaccatgctctgtgctgccagcggaaaccctgaccctgagatcacctggttcaaggacttcctgcctgtggaccccagtgccagcaatgggcggatcaagcagcttcggtcaggtgccctgcagattgagagcagcgaggagacagaccagggcaagtacgagtgtgtggccaccaacagcgctggggtgcgctactcatcacctgccaacctctacgtgcgagtccgccgtgtggccccccgcttctccatcctgcccatgagccacgagatcatgcccggtgggaatgtgaatatcacttgtgtggctgtgggctcacccatgccctacgtgaagtggatgcagggggcagaggacctgacgcctgaggatgacatgcccgtgggtcggaatgtcctcgaactcacggatgtcaaagactcagccaactatacttgtgtggccatgtccagcctgggagtgatcgaggccgttgctcagatcactgtaaaatctctccccaaagcccctgggactcccgtggtgacggagaacactgctaccagtatcactgtcacatgggactcaggcaatcctgaccctgtgtcctactacgtaattgagtataaatccaaaagccaggatgggccgtatcagatcaaagaagacatcaccaccacgcgctacagcatcggcggcctgagccccaactctgagtatgagatctgggtgtcagctgtcaactccatcggccagggcccccccagtgagtcggtggtgacccgcacaggcgagcaggcaccagccagtgctcccaggaatgttcaggcgcgcatgctcagtgccaccaccatgattgtgcagtgggaggagcccgtggagcccaatggcctgatccgtggctaccgcgtctactacaccatggagcccgagcatccggtgggcaactggcagaagcacaatgtggacgacagtcttctgaccactgtgggcagcctgctagaggatgagacctacactgtgagagtgctcgccttcacatcggtgggcgatgggccactgtcagaccccatccaggtcaagacccagcagggagtgcccggccagcccatgaacttgcgggctgaggccaagtcagagaccagcattgggctctcgtggagtgcaccacggcaggagagtgtcattaagtatgaactgctcttccgggagggcgaccgaggccgagaggtggggcgaaccttcgacccaaccacagcctttgtggtggaggacctcaagcccaatacggagtacgcgttccggctggcggctcgctcgccgcagggcctgggcgccttcaccgcggttgtgtgccagcgcacactgcaggccaaaccgtcagccccccctcaagacgttaagtgcaccagcttgcgctccacggccatattgatccttctggaagctttggagaaatggacggagtaccgtgtcaccgccgtggcttacacagaggtgggaccagggcccgagagctcgcccgtggtcgtccgcaccgatgaggacgtgcccagcgcgcccccgcggaaggtggaggcggaggcgctcaacgccacggctatccgagtgctgtggcgctcgcccacgcccggcaggcagcacgggcagatccgcggctaccaggtccactatgtgcgcatggagggcaccgaggcccgcgggccaccgcgcatcaaggacatcatgctggcggatgcccaggaaatggtgatcacaaacctccagcctgagactgcttactctatcacagtagccgcgtataccatgaaaggcgatggcgctcgcagcaaaccgaaggtggtggtgaccaagggagcagtgctgggccgccccaccctgtcggtgcagcagacccccgagggcagcctgctggcgcgctgggagccccccgcggacgcggctgaggacccagtgcttggctaccgcctgcagtttgggcgcgaagacgcggccccggccacgttggaactggcggcgtgggagcggcggttcgcggcgcctgcacacaagggcgccacctatgtgtttcggctggcggcgcggggccgcgcggggctgggcgaggaggcctcggcggcgctgagcatccctgaggacgctccgcgtggcttcccgcagatcctgggccccgcgggcaacgtgtccgcgggctccgtaatactgcgctggctgccacccgtgcccgccgagggcaacggcgccatcatcaagtacacggtgtccgtgcgggaggccggcaccccagggcccgcgacagagaccgaactggcggcggcggcccagccgggggccgagacagcgctcacactacaggggctgcggccggagacggcctacgagctgcgcgtgcgcgcgcacacgcgtcggggccccggccccttctcacccccgctgcgatacaggcttgcgcgggacccagtctcccccaagaacttcaaggtgaagatgatcatgaaaacttcagtgctgctaagctgggagttccctgacaactataactcacccacgccctacaagatccagtacaatggactcacactggacgtggatggccgcactaccaagaagctgatcacgcacctcaagccacacaccttctataacttcgtgctcaccaaccgtggcagcagcctgggaggcctgcagcagacggtcaccgccaggaccgccttcaacatgctcagtggcaagcctagtgtcgccccaaagcctgacaacgatggttccattgtggtctacctgcctgatggccagagtcccgtgacagtgcagaactacttcattgtgatggtcccacttcggaagtctcgtggtggccagttccctatcctactaggtagtccagaggacatggatctggaggagctcatccaggacctctcccggctgcagaggcgcagcctgcgccactcaagacagctggaggtgcctcggccttacatcgccgctcggttctccatcctgccagctgtcttccatcctgggaaccagaagcaatatggtggctttgacaacaggggcttggagccaggccaccgttatgtcctctttgtacttgctgtgctgcagaagaatgagcctacatttgcagccagtcccttctcagaccccttccaactggacaacccagacccgcagcccattgtggatggcgaggagggcctcatctgggtgatcgggcccgtgctggccgtggtcttcatcatctgcatcgtaattgccatcctgctgtacaagaacaagcctgacagcaaacgcaaggactcagagccccgcaccaaatgcttattgaacaatgcagacctcgccccccatcaccccaaggaccctgtggaaatgcgacgtatcaacttccagacgccaggtatgctcagccacccgcccattcccatcacagacatggctgaacacatggagagactcaaagccaacgacagcctcaagctctcccaggagtatgagtccatcgaccctggccagcagttcacttgggaacattcgaacctggaggccaacaagccaaagaaccgatacgccaatgtcatcgcctatgaccattcacgagtcatcctgcagcctttagaaggcatcatgggtagtgattacatcaatgccaactatgtggacggctatcggcggcagaacgcatacatcgccacgcaggggcccctgcctgagacctttggggacttctggcggatggtgtgggagcagcggtcagccactgtggtcatgatgacacggctggaggagaaatcacgggtcaaatgtgaccagtactggcctaaccgaggcaccgagacatacggcttcatccaggtcaccctactagatactatggagctggccaccttctgtgtcaggaccttttctctacacaagaatggctctagtgagaagcgtgaggtacgacattttcagttcacagcatggcctgaccacggggtacccgagtaccccacacccttcctggcgtttctgcgcagagtcaagacctgcaacccgcctgacgctggcccagttgtggtccactgcagcgcgggtgtggggcgtactggctgcttcattgtaattgatgccatgttggagcgcatcagaacagagaagacggtggatgtgtacggacacgtgacactcatgcggtcacagcgcaactacatggtgcagacagaggatcagtatagcttcatccacgaggcactgctggaggctgtgggctgtggcaataccgaggtccccgcgcgcagcctctacacctatatccagaagctggcccaggtggagcctggcgagcatgtcacaggaatggagcttgagttcaagaggcttgccagctccaaggcacacacttcgagattcatcactgccagcctgccttgcaacaagtttaagaaccgcctggtgaacatcctgccgtacgagagctcgcgtgtctgcctgcagcccattcgtggtgtcgagggctctgactacatcaatgccagcttcatcgacggctacagacagcagaaagcctacattgcaacgcagggtccactggcagagaccacagaggacttctggcgtgccctgtgggagaacaactccactattgtggtaatgctcaccaagctccgcgagatgggccgggagaagtgccaccagtactggccagctgaacgctctgcccgctaccagtactttgtggttgacccgatggcagagtataacatgccacagtacattctgcgtgagtttaaggtcacagatgcccgggatggccagtcccggaccgtccgacagttccagttcacggactggccagagcagggtgcacccaagtcaggggaaggcttcattgacttcatcggccaagtgcataagaccaaggagcagtttggccaggatggccccatctcggtgcactgtagtgctggagtgggcaggaccggagtattcatcactctgagcatcgtgctggagcgaatgcgctacgagggggtggtggacattttccagacagtgaaggtgcttcggacccagcggcctgccatggtgcagacagaggatgagtaccagttctgcttccaggcggcgttggaatacctgggcagctttgatcattatgcaacataagccatggccccgcccaacacctcgacccagctccaagtgccctgaatgtgagcccagccctcggtgctgggtgggaggcggcccagggaggaaacctcctctccctggagacaggcactgccttctgaagggcacattcctcattcccttctgactccaaaacgaggttccagggtggggggtagggtggagagtagaggagccactgctcccatagctggggtcacaagggacagaactctgctcccacacttccctgcctgc

SEQ ID NO: 605 - DNA, 6040 bp, Homo sapiens; identical to SEQ ID NO: 604

SEQ ID NO: 606 - DNA, 2499 bp, Homo sapiens
  misc_feature (1780)..(1780): n is a, c, g, or t
  misc_feature (1808)..(1808): n is a, c, g, or t
gattccatcctaatacgactcactatagggctcgagcggccgcccgggcaggtgcgctgtaatctgaaccagctgtgtccagaccgaggccccatttgcattgtttaacatacttagaaaatgaagtgttcacttttaacattcctcctccaattggcttaatgctgaattactgaagggggttaagcgaaaccaggtgccggcggcgagggctctgcagtggctcccagcacccggcactgtccccggccctccgcgcagccccgttcggcccctcggaaaccaagctgcccggtcccgcgcagagcctgccttcctcaaatcacctctcctcccgcgcatcttggatatgccaggattaaaaaggatactcactgtcaccatcctggcactgtggcttccacatcctgggaatgcacagcaacagtgcaccaacggctttgacctggaccgccagacaggacagtgtttagatattgatgaatgtcggaccatccctgaggcttgccgtggggacatgatgtgtgtcaaccagaatggcgggtatctgtgcatccctcgaaccaacccagtgtatcgagggccctactccaatccctactctacatcctactcaggcccatacccagcagccgcaccaccagtgccagcttccaactaccccacgatttccaggcctcttgtctgtcgctttgggtatcagatggatgaaggcaaccagtgtgtggatgtggacgagtgtgcgacagattcacaccagtgcaaccctacccagatctgtatcaacacggaaggagggtacacctgctcctgcactgatgggtactggcttctggaagggcagtgcctagatattgatgaatgtcgctatggttactgccagcagctctgtgcgaatgttcctggatcctattcctgtacgtgtaaccctggcttcaccctcaacgatgatggaaggtcttgccaagatgtgaacgagtgtgaaactgagaacccctgtgttcagacctgcgtcaacacctatggttctttcatctgccgctgtgacccaggatatgaactggaggaagatggcattcactgcagtgatatggatgagtgcagcttctccgagttcctctgtcaacatgagtgtgtgaaccagccgggctcatacttctgctcatgccctccaggctacgtcttgttggaagataaccgaagctgccaggatatcaatgaatgtgagcaccggaaccacacatgcactcccctgcagacttgctacaatctgcaagggggcttcaaatgtatcgaccccatcgtctgcgaggagccttatctgctgattggggataaccgctgtatgtgccctgctgagaatactggctgcagggaccagccattcaccatcttgtttcgggacatggatgtggtatcaggacgctctgttcctgctgacatcttccagatgcaagcaacgacccgataccctggcgcctattacattttccagatcaaatctgggaacgagggtcgagagttctacatgcggcaaacagggcctatcagtgccaccctggtgatgacacgccccatcaaagggcctcgggacatccagctggacttggagatgatcaccgtcaacactgtcatcaacttcagaggcagctccgtgatccgactgcggatatacgtgtcccagtatccgttctgagcctcgggttaaggcctctgacactgccttttaccagcgccgagggacaggaggagagaagaaaccagcaagaatgagagcganacagacattgcacctttcctgctgaacntctccctggggcatcagcctagcatcctgacccctacctgtactatcgcagactgtcactctgaaggacaccatgcccccagttcctatgatgcagttatccaaaagtattctccttgacccctgatgtgaggttgcaagtgactctccaaggccttccatttatttctatttttttttttttaaaaaggaaaatagattaggtttgctggggtaggagtctgtgttcaaagactgagcagcttgttcttgcctctgcccctccttcctctatctcttgctgcattgctgctttgcaaaagtcctcatgagctcatgggaaatgctgggtatagctattttgcttcttgcatgtgctgagaaggctatgggaacacgtcacagcaggatcaaaggtttttaaagagtctattttaaaatcacgtctggtattttcagcataagagaagttttagttgttcttacaatttgtatgagtgtttaaccttttctcgttcattttgagtttttaaagtgatagaattccttccagaaggcctcagatacatgttatgttcagtctttctaacctcagccttccctgcgtcttagcccagtttttatgaagacccctttaatcatgctttcttaagagtttttacccaactgggttggaagacagaggtatccggactgattaaatatttgaagaa

SEQ ID NO: 607 - DNA, 1588 bp, Homo sapiens
ccaggcaagacagtgagactccagaagctccgagcccagtttgccaaggccctctgctagaggcctgccatggcatctctgaggccctttttcatactagccctgctggcattggtttctctggctgaccaagagtcatgcaagggccgctgcactcagggtttcatggccagcaagaagtgtcaatgtgatgagctttgcacctactatcagagctgctgtgttgactacatggagcagtgcaagccccaagtgacccggggggatgtgtttaccatgccagaagatgagtattggagctatgactacccggaggaaaccaagaacagtaccaatgctggcgtgcaatccgagaacacctctctacactttaacctaaagcctcgagccgaagagactataaagccaacaactcctgatcctcaggaacagtcaaacacccaagaacctgaagtggggcaacagggagtggccccaaggcctgacaccactgatgaaggaacctctgagtttccagaagaagagctgtgtagtggaaagccctttgatgccttcacagacctcaagaatggttccctttttgccttccgaggtgagtattgctatgagctagatgaaacagcagtgaggcctgggtaccccaaactcatccaagatgtctggggcatcgagggccccatcgacgctgccttcactcgcatcaactgtcagggaaagacctacttgttcaagggtagtcagtactggcgctttgaggatggtgtcctggaccctgattatccccgaaacatctctgaaggcttcagtggcataccagacaacgttgacgcagccttagcccttcctgcccacagttacagtggccgggaaagggtctacttcttcaagggaaaacagtactgggagtatgaatttcagcagcagcccagccaggaggaatgtgaaggaagctctctgtcagccgtgtttgagcactttgccttgcttcagcgggacagctgggagaacatttttgaactcctcttctggggcagatcctctgatggcgccaaaggaccccaattcatcagcagggattggcatggtgtaccagggaaagtggacgctgctatggccggccgcatctacatcactggctccacattccgctctgtccaggccaaaaaacagaagtctgggcgtcgaagtcgaaaacgctaccgttcacgccgagggcgtggccatagccgcagccgcagccgcagcatgagctctcgtcgcccatcgcgttcagtctggttctctttgctctccagcgaagagagtgggctaggaacctacaattacgattatgatatgaactggctgatacctgccacctgcgagcccattcagagcgtctatttcttctctggagacaagtactaccgagttaaccttagaacacggcgagtggactctgtgaatcctccctacccacgctccattgctcagtattggctgggctgcccaacctctgagaagtaggaatcagcacccacacagctgagcttcagaaacctcgtcctccagctttttctcccagcccaataaagtgttggccccaaaa

SEQ ID NO: 608 - DNA, 1856 bp, Homo sapiens
gtctccctgagaaggctgccatggatccagccctagtcctggtgctcactctctcctctctgcttctcctctcactctggagacagagctttgggagagggaagctccctcctggtccaacacctctcccaatcattggaaacacccttcagatatatatgaaggacatcggccaatcaataaaaaagttttcaaaagtctacggccctatatttactctgtatttgggcatgaagccctttgtggtgttgcatgggtatgaagctgtgaaggaagctcttgttgatctaggagaggaattttctggaagaggcagttttccagtatctgaaagagttaacaagggccttggagtcatttttagcagtgggatgcaatggaaggagatccggcgtttctccatcatgaccctgaggacttttgggatgggcaagaggaccattgaggaccgtattcaagaggaggctcagtgccttgtggaggaactgaggaagagcaaaggtgccccttttgatcccacctttatcctgggctgtgctccctgcaatgtgatatgctccattattttccagaatcgccttgattataaagatccgacttttcttaacttgatgcacagatttaatgaaaacttcaggcttttcagctccccatggctacaggtctgcaatactttccctgccattattgattacttccctggaagtcataaccaagtacttaagaatttcttctatataaaaaactatgttttggagaaagtaaaagaacaccaagagtccttggacaaggacaatcctcgggacttcattgattgtttcttgaacaaaatggaacaggaaaagcacaatccgcagtctgagtttacccttgaaagcttggtggctactgtaactgacatgtttggagctggcacagaaacaacaagtaccactctgaggtatggactcctgctgctgctgaaacacgtggatgtcacagctaaagtccaggaagagatagaacgtgtaattggcagaaaccggagcccctgcatgaaagacaggagccagatgccctacacggatgctgtagtgcatgagatccagagatatattgaccttgtccccacaaacctgcctcatttagtgacacgtgatataaaattcagaaactacttcattcccaagggtaccaatgtgatagtatcgctgtcatccatactgcatgatgacaaagaatttcctaatccagagaagtttgaccctggtcactttctagatgagagaggtaactttaagaagagtgactactttatgccattctcagcaggaaagaggatatgtgcaggagaagccctggctcgcacggagctgtttttgttcttcaccaccattttacagaattttaacctgaagtctctggttgatgtaaaagacattgacacaacaccagctatcagtggatttggccatttgccccctttttacgaggcttgttttattcctgtgcaaagggcagactctctaagctctcatctgtaatgtctcttctgagggtcctgtctacttcattcttggtactatagtagctttaactcacatatccccatttccttcggatccagtgaacatcaaacctcattgagttgagttccctgagtcaatatatagttctattcctgttccctatatcttgtgacgttccctatatcttgtgacattcccatgcagtacttacatagttagtgctaatacttgtatgacttcattactgttaatactgttttcactatataaaagcaaaatattttagaatatgagaattcagagtcatctgttcccttcatgtgctaaataaatactaatttttggacc

SEQ ID NO: 609 - DNA, 1856 bp, Homo sapiens; identical to SEQ ID NO: 608

SEQ ID NO: 610 - DNA, 1856 bp, Homo sapiens; identical to SEQ ID NO: 608

SEQ ID NO: 611 - DNA, 2794 bp, Homo sapiens
aagctagtctgaaggggttgcgaaaaccccagcaatgtggagaagcctagggcttgccctggctctctgtctcctcccctatggaggagcagagagccaaggccaaagccctgcttgtaagcaagctccaccctggaacataggagatcaaaatccaatgctaaactccgagggcacagtgacagtggttgctcttcttcaagccagctgatacctgtgccttctgcaggcatccagattggaagacctgcgaataaaactagagaaccaaggatattttaacatctcctatattgttgttaatcatcaaggatctccttcccaattaaaacatgcacatcttaaaaagcaggtgtcagatcacattgctgtttacagacaagatgaacatcaaacagatgtctggacactcttaaatggaaacaaagatgacttcctcatatatgacagatgtggccgtcttgtgtatcaccttggtttgccctactccttcctcactttcccgtatgttgaagaagccatcaagatcgcttactgtgagaagaggtgtggaaactgctctttcacgagtcttgaagatgaagccttctgtaaaaacgtgtcctcggctactgcaagtaaaaccacagagccctcagaggagcataaccaccacaagcaccatgacaaacatgggcatgagcatcttgggagcagtaagccttcagagaatcagcaaccaggggcattagatgttgagacaagtcttcctccttcaggcttgcaccaccaccaccaccaccataagcacaagggccagcacaggcagggtcacttagagagctgagacatgggggcaagtgaaggcttgcaactttcacttgcccagaggaagctctgacgaaggggatgcataaaccagctcctgtgtaagttatctgaggagtctggggcagctaccagtagctgctgctgccactgccgacacctcatatttgagaagtcaggatctgcaatcacttgacagtgtgccgaaaacctcccatccttgtgtagctgacaggggcttttcgcggaggagaaagtcattgaatcctgtcaatgtagatcacctccagctgcctgacacagtcagcatgtaagccccacagaagccagccccaactgaagctgaaataataagaccaagaagtgaaaatgaaatttgaactaaatatttaaaataaagcgtactctccccaactccatctaaagacacaatttcatttctagaatgtttccaatccatttaattaattagtgaagtaaaagtagttgaaattggatttgtgcaaacatggagaaatctaccacattggcttctaaaatttaaaatttttatgccacaaaccatttcatccaaatcagatttgtaccgtggggcaactgaaaagtgattgcggccattggttaatatgtcttcctttttctttctccagtgttctagttacattgatgagaacagaaacataaactatgacctaggggtttctgttggatagctcgtaattaagaacggagaaagaacaacaaagacatattttccagttttttttctttacttaaaactttcaaaacaatagaaactttgtctttctaatcttatactttaaaccgattaaatctttaacagactacattttaaatatctacttatcttttttatctctaagactcctagtttgagtttcactacatatatctgtgaatcttgttttttcatctaatgctgtatcagtcttctgagttgtgagtgactgtcttgaaagagtaatggaagaaaagatggtgttaatctgcatagtgcttaagacagtatttccataatcaatgacggtttaatagagaaactgagtcctatgaacctgaactcctttatggctaatacaattaagcaagaatggagaatagaattgattggctacagtacagattatcaaaaataaatgcaacttaaaaagctggaaagtgtgtgtctttattgttcagctcacattgaaagtagaagtgcatctttagagccttaaagaaaactaggtaagttgttgctaatacactaagtgccctgctcaaaaccgcctccgagtgagggctgtctttggaggccgcgagctgctctaggtctcggatagtgttctggagacttgcaatttcttgttcttttcctcctgaagagctgaagcttctaaatgaagcagaaaaaaaactttgtcatagcaacttagaagtaaggttaagtataatgaactacaaagtagcaatcataacatttgtactttaaaaactatcctatggactggaaggcctgtagcttcatttttggtgtgctttaaagagaaagtctagtataaggctacaaaaataatttaatatacttaaaacaaatatggtttgccctggagttatcggtattttgatgctaatttcactgccccaaggacagctgcttagtcacatactcaggaatcagtgacttcaccagaaccttcttcccactgaatttgtaaaatacaggtgaggggcaggtataggatagaaggaggcctgtcattggaggagaaggaaggatgggcgggagagaagtttgaaggaagaggagaagactggaatggaaaagaggaagagacaggagggagagagagagaagccatggcaggagacattaagattctgttctgtgtatttacaggttgctattaatatgttcttaagggatggatggtactgggctttgtatgtttaggtgggcaattatatcttatcaattggatctaaa

SEQ ID NO: 612 - DNA, 1136 bp, Homo sapiens
gggcttcttggacgtttttgggaggggacagcaagggaaggtccttctgcctctagggacccagacttccgctttctgcagacagcagcaggctctgggctctgggaatccactgctgtctggcctagaagcatcatagaacacgaggattccatacacaggaggcccctgaagctgagctgagctgatgaagacacagtggagtgagatcttgacacccctgttgctgctgctcctgggtttgctccatgtctcctgggcccaaagcagctgtactgggtcccctggcatccctggggtccctggcatccctggggtccctggctctgatggcaaaccaggcactccagggataaaaggagagaaagggctccccggactggctggagaccatggtgagttaggagagaaaggggatgcagggatccctgggatcccaggcaaagttggccccaagggtcccgtcggccctaagggtgctccaggcccccctggaccccgcggtcccaaaggtggctctggagactacaaggctacccagaaagtagccttctctgccctgaggacggtcaacagcgccctgcgaccaaaccaggccattcgcttcgaaaaggtgatcaccaatgttaatgataactacgagccgcgcagtggcaagttcacctgcaaggtacctggcctctactacttcacctaccacgccagttcccgcgggaatctgtgtgtgaacatcgtgcgcggccgcgaccgagaccgcatgcagaaagttctcaccttctgcgactatgcccaaaacaccttccaggtcaccacgggtggggtagtcttgaagctggagcaggaagaggttgttcacctgcaggccacagacaagaactccctgctgggcgtcgagggagccaatagcatcttcactggctttctgcttttccctgacatggatgtatgatcacggggtcaaatcactcctatccaaaacctcctccctgccagtaatcctccctggaccccagacactgccctttgactgcccaaagccctgaccagagccctgtagatgttacagaatgggtaaataaactcttcaaggccaagaaaaaaaaaaaaaaaaaaaaaaaaaaaaaaaaaaaaaaccc

SEQ ID NO: 613 - DNA, 1365 bp, Homo sapiens
ggccattacggccggggactgcaggagggaagaagtctacgagaatccatccatttcctgcccacagcgaaggacagcatgagcacagctggaaaagtaatcaaatgcaaagcggccgtgctatgggagcctcacaagcccttcaccatcgaggacatagaagtcgcaccccccaaggcccatgaagttcgcattaagatggtggccaccggagtctgccgctcagacgatcacgcggttagtggatccctgttcacgcctcttcctgcagttctaggccacgagggagctggcattgttgagagcattggagaaggggtgacttgtgtgaaaccaggtgataaagtcatcccgctgttctctccccagtgtggaaaatgcaggatctgcaagcacccggaaagcaacctctgttgccaaactaagaatctgacacagcctaagggagctttgctggacggcaccagcaggttctcctgcaggggaaagcccattcaccacttcatcagcaccagcaccttctcccagtacactgtggtagatgacatagcggtggccaaaatcgatgcggctgcaccgctggacaaagtctgcctcatcggctgtggcttctcgactggctatggctctgccgtccaagtcgccaaggtgaccccaggctccacctgtgccgtgtttggcctggaaggtgttggtctgtctgtcgtcattggctgtaaaacagcaggagcagccaagatcattgccgtggacatcaacaaagacaagtttgcgaaggccaaagagttaggtgccactgactgtatcaaccctcaagactacaccaaacccatccaggaagttctccaggagatgactgatggaggggtggacttttcatttgaagtcattggccgtcttgataccatgacttctgccctgttaagctgccattcagcatgcggtgtaagcgtcattgtcggggtgcctcccagtgcccaaagcctctccgttaaccccatgtcgctgctgctgggacgcacctggaaaggagcaatattcggcgggtttaagagtaaagatgccgtccccaaacttgtcgctgacttcatggctaagaagtttccgttggagccgctgattactcatgttttaccttttgaaaagataaatgaagcatttgacctgctccgtgctggaaagagtatccgtaccgtcctgacgttctgagaacacatgaatgccttcccggtttctgactcctccgcctaccgaatcaagcgccagccacatcacaaccttaaccttgctcttcagagacacacagccaataaagcacctgtgcaagctttccgtagaaaaaaaaaaaaaaaaaaaaaaaaaaaa

SEQ ID NO: 614 - DNA, 1536 bp, Homo sapiens
cgctgcgcgggtctcagagccggttcggcgcgtcgactgtccagagtccgcggccgaggagacccgaggtccaggagacaagtgactatggcttaccacagcttcctggtggaacccatcagctgccatgcctggaacaaggaccgtactcagatcgccatctgccccaacaaccacgaggtgcacatctacgagaagagcggtgccaagtggaacaaggtgcacgagctcaaggagcacaacgggcaggtgacaggcatcgactgggcccccgagagtaaccgcattgtgacctgcggcacagaccgcaatgcctatgtgtggacgctgaagggccgcacgtggaagcccacgctggtcatccttcggattaatcgagctgcccgctgcgtgcgctgggcccccaatgagaacaagttcgccgtgggcagtggctcccgtgtcatttccatctgttattttgagcaggagaatgactggtgggtgtgcaaacacatcaaaaagcccatccgctccactgtccttagcctggactggcaccccaacaacgtgctcctggctgcaggctcctgtgacttcaagtgcaggatcttctctgcctatatcaaggaggtggaggaacggccagcccctacaccgtggggctccaagatgccctttggggagctgatgtttgaatcgagcagcagctgtggctgggtgcatggtgtctgcttctcggccggtgggagccgagttgcttgggtcagccatgacagcactgtgtgcctggtagatgctgagaagaagatggccgtggcaaccctggcctctgagacattaccgctcctggccatcaccttcatcacagaaaatagtctcgtggcagcgggccacgactgcttcccggtgctgtttacctatgacaacgctgcggggacattgagctttggtggccggctggatgtgcccaagcagaactcccagcgtggcctgacagcccgagagcgcttccagaacctcgacaagaaggccagctctgaagggggtgcagccacaggggctggcctggattcactgcacaagaacagcgtcagtcaaatctcggtgctcagcgggggcaaggccaagtgctcgcagttctgcaccacaggcatggacggtggcatgagcatctgggatgtgaagagcttggagtcagccttgaaggacctgaagatcagatgagctgtgaggagtgctgtcctcatcccacatgctggggaggagggaaaggggttggggaggctaagggctgctttgctgaatgcttctagggtgtagtacaggtctgcaaaggggatgctctctctccaaagaggggaagaggaaggtggggaactttcctgcctatttaatgaaaatgtgccttttaaagagatgctttcattcattgcaaaccaaaaacaagacaaaaaacccaaagcacaatgctggtcataaactgcttcaaaatgtgggctaataaacataccaaatgtgaaaaaaaaaaaaaaaaaaaaaaaaaaaaaaaaaaaa

SEQ ID NO: 615 - DNA, 1536 bp, Homo sapiens; identical to SEQ ID NO: 614

SEQ ID NO: 616 - DNA, 1737 bp, Homo sapiens
caagcaaaagcaggagctgtccagcgctgagagacaggaaaggccatggctaaggagtggggttacgccagccacaatggtcctgagcactggcatgaactttatccaattgccaaaggggacaaccagtcacccattgaactgcatactaaagacatcaggcatgatccttctctgcagccttggtcagtatcttatgatcctggctctgctaagaccatcctgaacaatgggaagacctgcagagttgtgtttgatgataccttcgacaggtccatgctgagaggtggccctctctctggaccctaccgacttcgccaattccatcttcactggggctcctcggatgaccatggctctgagcacacagtggatggagtgaagtatgctgctgagcttcacctggttcactggaacccgaagtataacaccttcggagaggctctgaagcagcccgatgggattgctgtggttggcatttttctgaagataggacgggagaaaggcgagttccagattctccttgatgccctggacaaaattaagactaagggcaaggaggctccttttaatcacttcgacccatcgtgcctgttccctgcttgccgggactattggacctaccatggctccttcaccacgccaccctgcgaggagtgcattgtgtggctgctactgaaagagcccatgacagtgagctcagaccagatggccaagctgcgcagcctgttcgccagtgcagagaatgagcccccggtgcctctggtggggaattggcgccctcctcagccgatcaagggcagggtggtgagggcctccttcaagtaaggctctggacgtgccctcttcaggaaaggaattctgtccctgaagagccagcttgcctcctcctggtgctccctgctccaagctatcctacaacactgagagaaagaagagacgcagtcagatgaaaccgcagtgccttttgacatgatctaacccagaagcatgaatttcacacctaacctttttaataactaccttttctaaaaaaattagtatttctagtataaattcagtgaagaagaaatagatggaaaaataacgacagtgacagtggcttattaagcatattaagtttctcagaatctcagcactcctgttttcaggctgagttactgacaagtgatgggtccatgctatgtatgtgggtatggaggcatgtgcccaccttaccacatttgattgaaagcacaagttaagatcactgtagatttcagaaggtgaatacataatgtttacctcaaataataccatcgctactctatcactttttaaaaatttgcctactaccaacttcgcctggttttaaattaccgataaacacacacccataaggccaggtcttttaaattttttgatccagcatttaaatttcttcttcataaagatggttttctttgcccaatctagggtcatttattttttatttcactactttaatctttgcatgcctattaaaaacaaagcaaaacaaacaaacaaaaaaaaaaaaccaaaaaaaaaaaaaaaaaaaaagctgtctctggtgtcttttgagttggaagttggaatgactggttcctgagacaggaaggagggaatgccagcactgaagctgagagtttgtactgatcgcagaagcaataaagacgggatggaaatgaaaaaaaaaaaaaaaaaaaaaaaaaaaaaaaaaaaaaaaaaaaaaaaaaa

SEQ ID NO: 617 - DNA, 2280 bp, Homo sapiens
ggtgcttacaaatggaaaacttccaacagctgacttactatggattgatccagtgcttgcgttggtgaatcaatctcccgaggaaaattccacagaaattccaggagcttggagtaaacaagaccccgcccagcccaggaggaagctgtagttcgagcttcattccggaacccagcgccatttcccgtactctgggtggggccgcctcctccaccgctttgccgtgagactgggcttgagaccgctgtgaggggaatggaggcttcttcgcctctggaccccgtggggcgccttgtagccttctgccgcggaggagtgcatctggccgtcctgctgctgttcttgtcgccatctactttgggccagtgcccagccccaccactgtttccttatgccaaacctataaatccaactgatgaatccacgtttcccgttggaacatctttgaagtatgaatgtcgtccaggatatatcaagaggcagttctctatcacctgcgaagtaaactcagtgtggacaagtcctcaagacgtgtgtatacgtaaacaatgtgaaactcctttagatcctcagaatggcatagtacatgtaaacacagacatccggtttggatcctctatcacttatacctgtaatgaaggataccgcctcattggttcctcctctgctatgtgcataatctctgatcagagcgttgcctgggatgccgaggcacctatttgtgaatcaattccttgtgagatacccccaagcattcccaatggagatttcttcagtcctaacagagaagattttcattatggaatggtagttacctaccagtgcaacactgatgcgagagggaagaagctctttaacctggtgggtgagccctccatacactgtaccagcatcgatggtcaagttggagtctggagtggccctcctcctcagtgcattgaactcaacaaatgtactcctccccatgttgaaaatgcagtcatagtgtctaaaaacaaaagcttgttttccttaagggatatggtggagtttagatgtcaggatggctttatgatgaaaggagacagcagtgtgtattgtcgatccctaaacagatgggagcctcagttaccaagctgcttcaaggtgaaatcctgtggtgctttcctgggtgagcttcctaatgggcatgtattcgttccacaaaatcttcaactcggggccaaagtgacctttgtttgtaatacagggtatcaattaaaaggcaattcttctagtcattgtgttcttgatggagtggaaagcatttggaatagcagcgttcctgtgtgtgaacaagtgatatgtaaactccctcaggatatgagtggattccagaaagggttgcaaatgaaaaaagattattactatggagataatgtagccttggaatgtgaggatgggtatactctagaaggcagttctcagagccagtgccagtccgatgccagctgggatcctcctctgcccaaatgtgtctctcaagtgatatgtaaactccctcaggatatgagtggattccagaaagggttgcaaatgaaaaaagattattactatggagataatgtagccttggaatgtgaggatgggtatactctagaaggcagttctcagagccagtgccagtccgatgccagctgggatcctcctctgcccaaatgtgtctctcaagtgatatgtaaactccctcaggatatgagtggattccagaaagggttgcaaatgaaaaaagattattactatggagataatgtagccttggaatgtgaggatgggtatactctagaaggcagttctcagagccagtgccagtccgatgccagctgggatcctcctctgcccaaatgtgtctctcgctcaaacagtggtctaatagctggaattttcattgggataatcgtccttattttattcatcattttttcctactggatgattatgaagtttaaaaaacgcaattccaccaatgaaaagtgtaaagaagtgggtatctatttaaattctaaagaagacagctgtgttcagcctcagtctctgctcacaagtcaggagaacaacagtaccagtagcccagcacggaattcactcactcaagaagtctaatagccgccatgtacagtgatgtctctgaaacgcaaaacatttcctgtctgtatcacttttaaaataaactattttcttttaaaatctagatgtgttgttcatacataaggaatgcaacaaactcatggccactcaggatatttaacttgtttcaaaaat

SEQ ID NO: 618 - DNA, 1768 bp, Homo sapiens
  misc_feature (876)..(876): n is a, c, g, or t
gctgccttcactatggatggtgtgagcacagccatcttgcttctcctcctggctgtcatctctctgtccctgaccttcacctcatggggcaagggccagctccctccaggacccaagcctctcccaatcctaggaaacctgctgcagcttcgctcccaagacttgctgacctcactcaccaagcttagcaaggactatgggtcagtgttcacggtgtacctggggcccaggcgtgtgattgtcctcagcggatatcaaactgtgaaggaggctcttgtggacaaaggggaggagttcagtggccgaggctcataccccatctttttcaacttcaccaagggcaacggcatcgccttctccgatggagaacgctggaagatcctccgaaggttctctgtccaaatcctgaggaactttggcatgggaaaaagaagcatcgaggagcggatcctggaagaaggcagcttcctgctggacgtgctgcggaaaacggaaggcaagccctttgaccccgtgtttatcctgagccgctcggtctccaacattatttgctctgtcatcttcggcagtcgtttcgattatgacgatgaacggctgctcaccattatccactttatcaatgacaacttccagattatgagcagcccctggggcgagatgtacaacatcttcccgagtctcctggactgggtgcctgggccgcacagacgcgtgttccggaactttgggggcatgaaagatctcatcgcccgcagcgtccgcgagcaccaggactccctggaccccaactctccccgggacttcatcgactgcttcctcacaaaaatggtacaggagaagcaagacccactgagccacttcaatatggacaccctnctgatgaccacacacaacctgctctttggtggaacggagactgtgggcaccactttacgccatgccttcctcattcttatgaagtaccccaaagtgcaagcccgtgtgcaggaagagattgattgtgtggtgggacgttcgcggatgcccacgctggaggaccgtgcatccatgccttacacagacgcggtgatccacgaagtgcagcgctttgcagacgtcatccccatgaacctgccccaccgcgtcattcgggacacacctttcaggggcttcctgatacccaagggcacagatgtcatcacgctccttaacaccgtgcactatgactccgaccaattcaagacccctcaggagttcaatcctgagcattttctggatgccaatcaatccttcaagaagagccccgccttcatgccattttcggcgggacgccgactgtgtctgggagagccactggcacgcatggagctgttcatatacctcacctccattctccagaacttcacgttgcatccgctggtggagcctgaggacatcgacctgaccccgctcagctcagggctgggcaatttgccaaggcctttccagttgtgtatgcgcattcgctgagtactgcaccaggggactgctctggccctcttccaggggtttcactgttgtgggcctccattgacgtctctctcacgttcccttccctaaacccggggcctgccacgtgtcggtactttacccttcctatcttaagcgcatcttcatggaaaaaatgacgtgacaaaggggaaatacccatcttatacgcacagaccctgttctgcgatgcacccttttcctggctgtttgtatcatttcctagtaaataccttactagtaaaaaaaaaaaaaaaaaaaa

SEQ ID NO: 619 - DNA, 1377 bp, Homo sapiens
gttcgggattcacacatacacttcagaatgccgggtctaagttgtagattttatcaacacaaatttcctgaggtcgaagatgtagtgatggtgaatgtaagatccattgctgaaatgggggcctatgtcagcttgttggaatataataacattgaaggcatgattcttcttagtgaattatccagacgacgtatccgttctataaacaaactgatccgaattggcagaaatgaatgtgtagttgtcattagagtggataaagaaaaaggatatatagatttgtcaaaaagaagagtttctccagaggaagcaatcaaatgtgaagacaaattcacaaaatccaaaactgtttatagcattcttcgccatgttgctgaggtattagagtataccaaggatgagcagctggaaagcctattccagaggactgcctgggtctttgatgacaagtacaagagacctggatatggtgcctatgatgcctttaagcatgcagtctcagacccatctatcttggatagtttagatttgaatgaagatgaaagagaagtactcattaacaatatcaataggcgtttgaccccacaagctgtcaagattcgagcagatattgaggtagcttgctatggttacgaaggcattgatgctgtaaaagaagccctgagagcaggtttgaattgttctacagaaaccatgcccatcaagattaatctaatagctccacccaggtatgtgatgacaacaacgaccctagagaggacagaaggactctctgttctcaatcaggctatggcagtcatcaaagaaaagattgaggagaagaggggagtgttcaatgttcagatggagcccaaagtggttacagatacagatgagactgaacttgcaaggcagctggaacggcttgagagagaaaatgcagaagtggatggagatgatgatgcagaagaaatggaagccaaagctgaagattaaccttttggaaaacagtccaatttaaggagtacgaagcagccctttctggctgtaaaccctagacttgaaagttttccagtattgaaaacttcaaagctgaatatttttatttccaagtatttaagtattcgacaagccagaatctaaatgccctccttcatgtcagctgttttcacatagtggctctaacacctcaagcgtttttaagggagtggcttgatttgaccagagacaaatgttaaaccgcagtcctaaaattgggcttgcggttttcatttctgatgtctctggattggcacccttatggtttagagaattaccaggggctccagacaccaacaatcccaacctttctatataaaatgtactcaagcaaacatcaaataaatttctgggatattt

SEQ ID NO: 620 - DNA, 2958 bp, Homo sapiens
acgaactggagacaaatgaagagccctgcccctgcccacatgtggaacattgtactggtcttgctctcgctgttggctgtgcttccgatcactactactgagaagaatggcatcgatatctacagtctcacagtggactcccgggtctcttcccgatttgctcatactgttgttaccagccgggtggtcaacagagccgatactgttcaagaagcgaccttccaagtagagctacccaggaaagccttcatcaccaacttctccatgatcattgatggtgtgacctacccagggttgtcaaagagaaggctgaagccagaagcaatacactgctgctgtggccggggagagagcgctggccttgtcaagaccactgggagaaagacagagcagtttgaagtgtcagtcaacgtggcccctggttccaagactaccttcgaactcatataccaagagctgctccaaagacggctgggaatgtatgagctactcctcaaagtgaggcctgagcagctggtcaagcaccttcagatgacatctacatctttgagccctcagggtatcagcaccctggagacagagagtactttcatgacccaggagttggcaaatgcccttaccacttcacagaacaagaccaaggcacatatccagttcaagccgacactctcccagcaacggaagtctcagaatgagcaggacacggtgctagatggggatttcaccgttcgctatgatgtggaccggtcttccactggcggataccttcagattgagaacggctactttgtgcaccactttgccccagaggaccttcctacaatggccaagaatgtgctctttgtcattgataaaagcggatctatggcaggcaagaaaatccaacagacccgagaagccctaatcaagatcttgaaagacctcagcacccaagaccagttcaatatcattgtgttcagtggggaagcaaaccagtgggagcagttgctggtgcaagcaacagaagagaacttgaacagggcggttgactatgcttccaagatcccggctcagggagggaccaacatcaataaagcagtgctatcggctgtggaactgctggataaaagcaaccaggctgagctactgccctccaagagcgtttccctcatcatcctgctcacggatggcgagcccactgtgggggagaccaatcccaagattatccagaagaacacacaggaagccatcaatgggcggtatagcctcttctgcctggggtttggctttgatgtgaactatcctttcctggagaagctggccctggacaacggaggcctggcccggcgcatctacgaggactcagactctgctctgcagcttcaggacttctaccaggaagtggccaatccgctgctgtcatcagtgacctttgaatatcccagcaatgctgtggaggacgtcacgcggtacaacttccaacaccactttaagggctcagagatggtggtggctgggaagctccgggaccagggccctgatgtcctcttagccaaagtcagtgggcagatgcacctgcagaacatcactttccaaacggaggccagcatagcccaacaagagaaagagttccagggtcctaagtacatctttcataactttatggagagactctgggcgttgctgaccatacagcaacagctggagcagaggatttcagcctcaggagctgagttagaggccctcgaggcccaagttctgaacttgtcactcaagtacaattttgtcactcctctcacgcacatggtggtcaccaaacctgaagatcaagaacaattccaagttgctgagaagcctacggaagtcgatggtggagtgtggagtatcctctcagcagttcaacggcatttcaagactcctaccacaggatctaaactgctgacatccaggctgagaggaaataggttccagacattgtccagactcggggatggtctcgttggatctagacaatacatgcctcctcctggacttcctggacctcctggacttcctggacctcctgggcctcccggacatcctcattttgcttctagcattgactacggcaggcagccttccttgggaagggtgctagacctgccatccttatcctcacaagatccagccggcccaagtctagccatgttaccgaaagtggtggaacaagaaggcaccacaccagaggaatccccaaacccagaccacccccgggctcctaccatcatcctgccgcttccgggatctggtgtggaccagctctgtgtggatatcttacattctgagaagcccatgaagctgtttgtagacatcaatcaggggctggaggtggttggcaagtatgagaagaatatcgggttctcatggatcgaagtgaccatcctgaagcctcacctgcaggtccatgcaacgcctgaacgactggtggtgacaaggggccgaaaaaactctgaatacaagtggaagaagacactgttctctgtgttacctggcttaaagatgaccatggataagacgggactgctacagctcagtggcccagacaaagtcaccatcagcctcttgtctctggatgaccctcagagaggactcatgctgcttttgaatgacactcatcacttctccaacgacattacaggggagcttggtcagttttaccaggatatcatctgggatgatacaaaacagacagtcagagttctaggaatcgactacccggctaccagagagctcaagttgagttatcaagacgggttcccgggaacagagatttcctgctggacggtgaagatatagaactgacaggagcattgtttgctacctgccatgttgtcctcgtatgcaggcggatgacactgtgtgccaacagggccgcctgtgaggcctagaccttgatggggaagaggatgctctcttgttacaaataaagaagggtgatgt

SEQ ID NO: 621 - DNA, 2119 bp, Homo sapiens
cttatacctcttccccaaccttcccttagttctcgcacctcctttctgctctgtcctctgtccagtgtcttgagattcctgtcccctcccggacctcagtaactcactgcccgtttattcacccagcaggatgtcacagctgagcctctcctggctgggactggggcctgaggtggccttcccatggcagaccctgctactgtttggagcctcctggatcctggcccaaattctgacccagatctacgctgcctataggaactttcgtcgcctccgtggcttccctcagccccccaaacggaactggcttatgggtcatgtgggcatggtcactcctacagagcagggcttgaaggaattgactcggttggtgggtacctacccccaaggctttttgatgtggattgggccaatggtccccgttattactctgtgccactctgacatcgtccgatctatcctcaatgcctcagctgccgttgcgctcaaggatgtgatattctacaccatcctcaagccttggctgggggatgggctcctggtgagtgctggtgacaagtggagccgccaccgccgcatgctgacacctgccttccacttcaacatcctgaaaccctatgtgaagattttcaacgacagcaccaacatcatgcacgccaagtggaaacggttgatttcagaaggcagttcccgtctggacatgtttgagcacgtcagcctcatgactctggacagtctgcagaaatgtgtcttcagctttgacagcaactgccaggagaagtccagtgaatatattgctgccatcctggagctcagtgccctagtggccaaaaggcaccagcagcctttgctgttcatggacctgctgtacaatctcacccctgatgggatgcgcttccataaggcctgcaacctggtgcatgaattcactgatgccgtcatccgggagcggcgccgcaccctcccagatcagggtttggatgagtttctcaagtctaaggccaagtccaagactttggatttcattgatgtgctgctcctgaccaaggatgaagatggaaaggagctgtcggatgaggacatcagagcagaggccgacaccttcatgtttgagggccatgacaccacagccagtgggctctcctggattctatacaacctggcgaagcacccagagtaccaggagcgctgccggcaggaagttcaggagcttctgagggaccgagatcctgaggagattgaatgggacgacctggcccagctgcccttcctgaccatgtgcatcaaggagagtctgcggctgcaccccccagtcacggtcatctcccgatgctgcacccaggacattctgctcccagatggcaggaccattcccaaaggtatcatctgccttatcagtatctttggaattcatcacaacccgtctgtgtggccggaccctgaggtctacaaccccttccgctttgaccctgaaaacatcaaagacagctcacctctggcatttattcccttctcggcggggcccaggaactgcataggtcagactttcgccatgagcgagatgaaggtggcgctggcactaacactgctgcgcttccgactcctaccggacgacaaggaaccgcgcaggcagccagagctgatcctgcgtgccgagggcggactgtggctgcgggtggagccgctgagcgcgggcgcgcagtgacctcacagttggtctggagcacccccaccatcctacctctgaggatcccagaatgaacagaactgtcacccataccagaatcttacggagggccagcagggggcgctgtgaatccagtgagtgggtgagagaggccagttagtgtctgagccaaagacctttgacttcgtctaactgatcgccagcctttatcataaggtgcattcttctccaaccaacctggactattctctggacaataggaagccaaagaaacgtctgagcaagagaccagaatgaaacgcaaatttgagctcttattctcgcagcaaatcccttattcagctccatttccattattttgacctacattcaaatcatctaataaatacattctctcacctcggaaaaaaaaaaaaaaaaaaaaaaaaaaaa

SEQ ID NO: 622 - DNA, 1254 bp, Homo sapiens
cccgacaggagacagagcacattgtagctctccaactgccggattacctggcgaccacgttgtggtcagaagagtcctgcctgccggccatggagcgctgtgtgagagtgaagtcttgggtagaagagaatcgggcctcctttcagcctccggtttgcaacaagcttatgcaccgggagcagctcaaaatcatgttcgtcggaggccccaacaccaggaaggattatcacattgaagagggagaggaggtgttttaccagctggagggagacatggtgctccgagtcctcgagcaaggagaacaccgggatgtggttatacgacagggagagatattcctcctgcctgccagggtgccccactccccgcagaggtttgccaacaccatgggcctggtgattgagagaaggcgaatggagaccgagctggatgggctgaggtactatgtgggcgacactgaggatgtcctcttcgagaaatggttccactgtaaggaccttgggacgcagttagcccccatcatccaagagttcttccactctgagcagtaccgaacaggaaagcccaaccctgaccaactgctcaaggagccgccattcccgctgagtacacggtccgtaatggagcccatgtcactgaaggcctggctggagagccactccagggagcttcaggcaggcacatccctaagcctgtttggggacagctatgagactcaggtcatcgcccacggacaaggcagcagcaaaggcccgagacaggatgtagatgtgtggctgtggcaactggagggctcctctaaggtgacaatgggaggacagtgtgtggccctggccccagatgacagcctgctggtgcccgctgggttctcgtacatgtgggagcgagcgcaaggctctgtggccttgtctgtgacacaagaccctgcctgtaagaagccactggggtgacccttctgtgtgggcccaaagcagccacagggtgcctgagtgctgtcctgacagctgccctttccagacagctctttcagcctcatgacatctccgtggacattgacagggcccctccgtgatcgtgggctgtcactggcatccaccctgctgtcatgcttagctcaggatgcagaggggattcctaggacaccagtagttcccctctctcctaacagccctacactgtcagcgaggtgcataccgtcctcatgcgcctgtcagcctaacactaagaaatctctcaataaaggcctcctgctgg

SEQ ID NO: 623 - DNA, 721 bp, Homo sapiens
gaattcggcacgagcgccgttgcagctatggccactgctctaggatttcgctgcctttaccgaacgcgacctgcgacgctcggtcggtacgtcgataggctgtggaggagcccgagtcgggggcaccggctttctccggctgacgatgagttataccagcggacgcgtatctctttgctgcaaaacgagttccctcaggccgtatacatcgacagctacaatagcagaggtttcactatcaacggaaaccgcgtgtttggaccttgtgcgctgctcccacagaccgtggtccagtggaacgtgggatctcatcaggatatcactgaagagagcttctcgattttctggatgctggaacctaggatagagattgttgtggtgggcaccggaaacaagactgagcggctgcactctcaagtcctgcaggccatgaggcagcggggaattgcggtggagatacaggacacgcctaacgcctgtgccaccttcaacttcctgtgccacgaaggtcgagtgacaggagctgccctcatccccccacctggagagactgcacttgcctcttctggtcaaaccacagagtgaaccatccagaacagtcaaggagggcactgagcttcgtgatctccccgtgccttccctactccccctcttggcacactagctgtcaatgctcacccaggataataattttatgatcttcttatcaaaaaaaaaaaaa

SEQ ID NO: 624 - DNA, 1360 bp, Homo sapiens
ggaaaaaggagtgagaaacaaagccgtcatctccagttccgcgtccaggcactttctaggtgacgatggacatacagaggacccaatccttgcttctgctcttgttgctgaccctgctggggttagggcttgtacagccctcctatggccaagatagaatgtaccaacggttccttagacagcatgtggaccctgaggggacaggcggcagcgacaactactgcaacgtgatgatgcagagacggaggatgacttctacccagtgcaaacgcttcaacaccttcatccacgaagacatctggaacattcgcagcatctgtgatactgccaatatcccatgcaagaatggcaatatgaactgtcacgaaggcatagtgagggtcactgactgcagagagacagggagctctgtgccccacaactgtaggtacagggcgagagccagcactaggcgagttgtcattgcctgtgagggtaccccagaggtcccagtgcactttgacagatagatgacatcctgtagctgctactgctggcagatgacctctgagtcagtgagaaaagcaatgagggatggctctaggctttgcttcctttgcttgtgtcttatcctcacatatatccaacgtaacccatggtgttaagtacttctcatccaagagaagaaagaagcctcttttcacagcactgatggccttgttctcccagattctatcgcctggaccatatgcattacatgtatttagatagtatttcaactatataaagagctttttctgtccaaggtgtctcattccaaccctctaacacaccttgatgccaatactgccactttacttagaagctcagagttaaaggatttgacgaccatacaaacggtggaggatctcagacaaaaatcaactgaacgggctactcacaaaggttactcacctacttctgttatccctaaatgtcatcgttagggaagccactcggagtttggaaatagggactggagagatacctctgtggtcaagagcactggctgctccactagaggacccaggttcaattcccagtaccctcacagcagctcacaacggtctgtatccagctctaggtggtttgacaccccacacagatagacatgtcggcagaacaccaatgcacataaaattaaaataaggagtttggaagtaaaacatcggcaaaatgagagctacttggcattattttggtttgtggctactaagatttttttaactatatgaaaaatgtagaacatcactaagattggtttacccttctccgaaagattttcaatattttattataataaagaactgtatgttgaaaaaaaaaaaaaaaaaaaaaaaaa

SEQ ID NO: 625 - DNA, 3061 bp, Homo sapiens
tgtgaccgcggccaagcccgctcgccttctgcggcgagtagggcctcgcggcgtcatcggcggcgaggagccgctgcggcctggccgaccatgtcggacgcggctgaggagcagcccatggagacgacgggcgccaccgagaacggacacgaggccgcccccgaaggcgaggccccggtcgagcctagccctggcagcggccccgcgactccggcggggtctgtgggcgggaccacggccgccccgagcgggaaccagaacggcgccgaaggcgaccagatcaacgccagcaagaacgaggaggacgcgggaaaaatgttcgttggtggtctgagctgggataccagcaaaaaagatctaaaggattattttactaagtttggagaggtcgttgactgtacaataaaaatggatccgaacactggtcgatcaagagggtttgggtttattctcttcaaagattcttctagtgtggagaaggtcttagatcagaaggagcacagactggatggtcgtgtcattgaccctaaaaaggctatggctatgaagaaggaccctgtgaagaaaatctttgtgggaggtctaaaccctgaagccacagaggaaaagatcagagaatactttggccagtttggggagattgaggccattgaacttccaatagatcccaagttgaacaaaagacggggttttgtttttattacatttaaagaggaagaccctgtgaagaaagttctggagaaaaaattccatactgtcagtggtagcaagtgtgaaatcaaggttgcccagcccaaagaggtgtaccagcaacagcagtatggctctgggggccgaggaaatcgcaatcgagggaaccgaggcagtggtggaggtcagagtcagagttggaatcagggctacggcaactactggaaccagggctacggctaccagcagggctacgggccgggctatggcggctacgactactcgccctatggctattacggctacggccccggctacgactacagtcagggtagtacaaattacgggaagagccagcgacgtggtggtcatcagaataactacaagccatactgagaggcagcaggagcggccgagtgacgacgcacacgctttgtttggacgcggagtgaacacaattatgtaccaaatttaacttggcaaacttttatggcctgtcccatgtgcatcttatttaaaatttcccccggaaatcactctcctgtttactattccagagctctagttgttgtaggcagcgtgtggcgtctcagaggtcagagcggcattagggggctgattttattaccaggttaccctgttctagattggagggtctgcttcctgctgccgctctgcagcctggacctgtggaccctggttgtaaagagtaaactgtatcttaggaaaccagtgtcacctttttcaccttttaattttatattatttgtgtcatacatttccagtaatggaagtgttaattttactgtactttttggtaccttttgggaatctaatgtattgtaaggtattttacacgtgtcctgattttgccacgacctggatattgaagctatccaagcttttgaaataaaaatccctgagagtctggtccactaactccagggactgtgggacagaggaacaaacaagaaagaactcgaggcctcgctgagtggcacgcttgctgagtgctgccacatcccgcaagctgagcaggtatcccaactctgttcctgcccggtagaccacccgaggtgtgagtgtggtcttgtcttccagattcgtaggacagaagctccaggaggaggacccgcccaacatggcatcggagagcgggaagctatggggtggccgatttgcaggctcggtcgaccccaccatggacaagttcaactcatctatcgcctatgaccggcatctgtggaatgtggacctgcagggaagcaaggcctacagcaggggcctggagaaggcagggcttcttcaccaaagctgagatgcagcagatactgcaaggcctggacaaggtggctgaagagtgggcccaaggcatcttcaaattgtaccctaatgatgaagacatccaccttcctcaaggtgctcattgaagccatggtagaccgggcagaggcggagtgtgaagtcctcttccctgggtacacacacttgcagagagctcagcccatccgctggagccactggatcctgagtcacgccgttgcgctgacacgagatttagagagactgaaggaggtgcagaagcggatcaatgtcctgccactgggcagtggggccattgcaggcaaccctctaggtgtggaccgggagttcctctgtgcagaactgaactttggagccattacgctcaacagtatggatgccaccagcgagagagacttcgtggctgagttcctgttttgggcttctctgtgcatgacccatctcagcaggatggcagaagacctgattctctacggtaccaaggaattcaactttgtgcagctctccgatgcctacagcaccggaagcagcttgatgccccagaagaaaaacccagacagcttggagctgatccggagcaaggcgggccgagtgtttgaagtgtctgataccatgacagctgtcctccaagtagccactggagtcatctctacactgcagattcatcgtgagaacatggcacaggcactcagccctgacatgctggctaccgaccttgcctactacctggtccgcaaagggatgccattccgccagcccacgaggcctcagggaaagctgtggtcgtggcagagatgaaaggggtggctctcaaccagctgtcacttcaggagatgcagaccgtcagtcccctgttctcgagtgacgtgaatctcgtgtgggactacagccacagcgtggagcagtacacagccttgggtggcacagcacagtccagtgttgagtggcagatcagccaggtgcgggccctgctgcagatgtagcagccctagattccacccagtcaaagctgcgccccaataaagtggagccctggagaggccgccat

SEQ ID NO: 626 - DNA, 2424 bp, Homo sapiens
ggctgactgacagcctttttttttttttttttaatatttaattggagatagggtctataacccaggctaccttgagctactttatgcagcttgggatgacctagaacttctgatcttcctacttcaatctcccgaaagctgaggttactggcatacacaccatgcttcgttagtagtctgtgttggcctagaacctgcgacaagccttttgcctcagctcccagagtactggaatgatcagcatacaaaaccatacctgatttagcacgtgacctaccttctgcccactattttgagacagggtctcactatctagtactggttggcccataactcactatgcaaactaagctgtcttagaactggcagatccgtctgtctctgcctcccaagggttgaaattgttttgaaacaggttcatctgcaacctagacctggaactcccagcaatcttcctgcctcggcctcccaaatgctgctgggatgacaggcctctcatgtcttcaccccagtacagaccttatgtgcttgcccctcagtacagctagtgctgattccctgaaaaatcacctcttcctgctactagtagctcaaccagagatagtcccgcccataggcgtgattgatgagtcacacccacctctcccaattggttctactcttccaggaggcggggacaaggcaggggcagcagacgccatccggaccagaaaaagccaggagagaccagaaggtgcctggtccctgagagtctggtccactaactccagggactgtgggacagaggaacaaacaagaaagaactcgaggcctcgctgagtggcgcgcttgctgagtgctgccacatcccgcaagctgagcaggtatcccaactctgttcctgcccggtagaccacccgaggtggtgagtgtggtcttgtcttccagattcgtaggacagaagctccaggaggaggacccgcccaacatggcatcggagagcgggaagctatggggtggccgatttgcaggctcggtcgaccccaccatggacaagttcaactcatctatcgcctatgaccggcatctgtggaatgtggacctgcagggaagcaaggcctacagcaggggcctggagaaggcagggcttctcaccaaagctgagatgcagcagatactgcaaggcctggacaaggtggctgaagagtgggcccaaggcatcttcaaattgtaccctaatgatgaagacatccacacggccaacgagcggcgcctgaaggaactcattggtgaagctgcagggaagttacacacaggcagaagtcgcaatgaccaggtggtcacggacctcaggctgtggatgaggcaaacctgctcaaaactctccaccttcctcaaggtgctcattgaagccatggtagaccgggcagaggcggagtgtgaagtcctcttccctgggtacacacacttgcagagagctcagcccatccgctggagccactggatcctgagtcacgccgttgcgctgacacgagatttagagagactgaaggaggtgcagaagcggatcaatgtcctgccactgggcagtggggccattgcaggcaaccctctgggtgtggaccgggagttcctctgtgcagaactgaactttggagccattacgctcaacagtatggatgccaccagcgagagagacttcgtggctgagttcctgttttgggcttctctgtgcatgacccatctcagcaggatggcagaagacctgattctctacggtaccaaggaattcaactttgtgcagctctccgatgcctacagcaccggaagcagcttgatgccccagaagaaaaacccagacagcttggagctgatccggagcaaggcgggccgagtgtttggacggtgcgcaggactcctgatgaccctcaagggacttccaagcacctacaacaaggacttacaggaagacaaggaggctgtgtttgaagtgtctgacaccatgacagctgtcctccaagtagccactggagtcatctctacactgcagattcatcgtgagaacatggcacaggcactcagccctgacatgctggctaccgaccttgcctactacctggtccgcaaagggatgccattccgccaggcccacgaggcctcagggaaagctgtggtcgtggcagagatgaaaggggtggctctcaaccagctgtcacttcaggagctgcagaccgtcagtcccctgttctcgagtgacgtgaatctcgtgtgggactacagccacagcgtggagcagtacacagccttgggtggcacagcacagtccagtgttgagtggcagatcagccaggtgcgggccctgctgcagatgtagcagccctagattccacccagtcaaacgtgcgccccaataaagtggagccctggagaggccgccataaaccc

SEQ ID NO: 627 - DNA, 1733 bp, Homo sapiens
ccacgcgtccgagctcctacctgagcagaggtattctggcagcaatggcatcgtcggacactgaaggaaaaagagtggttgttatcggtggtggtttggttggagcattgaacgcgtgctttctcgcaaagaggaatttccaagttgatgtgtacgaagctagggaagatattcgagtggctaactttatgcgtggaagaagcattaatttggccctttcttatagaggacggcaggccttgaaggccgttggtctggaagatcagatcgtgtccaaaggtgtgcccatgaaagccagaatgatccactctctctcgggaaagaagtctgcaattccctatgggaacaagtcacagtatatcctttcaataagcagagaaaagttaaacaaggatctgctgactgccgtggagtcctaccccaatgcaaaggtgcactttggccacaagctgtcaaaatgctgtccggaggaagggatactcacgatgcttggacccaacaaagttcccagagacatcacgtgtgacctcattgtaggatgtgatggggcctactcaactgtcagagctcacctcatgaagaagccccgttttgattacagtcagcaatatatccctcatggctatatggagctgacaattccacctaagaacggggagtatgccatggaacctaactgtcttcacatttggcctagaaatgcctttatgatgatcgccctaccgaacatggacaaatctttcacatgcaccttgttcatgtcctttgaggagtttgaaaagcttccaacgcatagtgatgtgctggacttcttccagaagaactttccagatgccatccctctgatgggcgagcaagccctcatgagagatttctttctgttgcctgcccagcccatgatatcagtaaagtgctctcccttccacctgaagtcacgctgtgtgctgatgggagatgcagctcatgccatcgtcccattttttgggcaaggaatgaatgcgggctttgaagactgcttggtatttgatgagttaatggacaaattcaataatgatcttagtgtgtgccttcctgaattctcaagatttaggattcctgatgaccatgcaatttcagacctgtctatgtacaattacatagagatgcgagcgcatgtcaactctaggtggttcctgtttcaaaggctcctggataaatttcttcatgcactaatgccatccactttcatccctctctataccatggtcgccttcaccagaataagataccacgaggcagtgctgcgctggcattggcaaaaaaaggtgataaacagaggactctttgtccttgggtccctggtagccattggaagtgcctacatactcgtgcaccacctgtccccgagacctctggaactcctgagatctgcctggacgggaacctctggccactggaataggagtgcagacatttctccacgagttccatggagtcactaggacaaatgccccagttcactatccatagtgtcaacgttccgggtagcaaatgcttgattcctcttcaatatcaagggagaaactcatgttcccattgccgtcttcagttcactatgggaaaatcattgtcagcatataattaagttcggagtggagggctgtttttacagtgtctcattattttgcatgcttggactgggttcaatttttaaatttaaaaacacaataaccaaaaaaaaaaaaaaaaaaaaa

SEQ ID NO: 628 - DNA, 1628 bp, Homo sapiens
gctgagatggggctgtcccagctatggctgtggctgaagcggcttgtgatattcctgcaggtagccttggaggtggctacgggcaaggtgctaatgacactgttcccagagagagtcaagcagaacatcctggccatgggccaaaagaccggaatgaccaggaatccccgattcgcccctgacaactgggtccccaccttcttcagcatccagtacttctggttcgtcctgaaggtccgctggcagagactggaagacagggctgagtatggggggctggcccccaactgcaccgtggtccgcctctcaggacagaagtgcaacgtctgggatttcattcaaggcagcagacccctggtgttgaacttcggcagctgcacctgaccttcatttcttctcaaatttgaccagttcaagagactcgtagacgactttgcctccacagctgacttcctcatcatttacattgaagaagctcacgccacagatggatgggcttttaagaacaacgtggacatcaggcagcaccgaagcctccaggaccgcctgcgggcagcacatctgctgctggccaggagcccccagtgtcctgtggtggtggacacaatgcagaaccagagcagccagctctatgcagctctgcctgagaggctctatgtgatacaggaaggcaggatctgctacaagggtaaacctggcccttggaactacaatcctgaggaagtccgagctgttctggaaaagctttgcatcccacctggacacatgcctcagttctagggggccagcaggaaggtcccccaagcttggtactcctccccaccagtacagatgtcctttagctttgaccttcgttcccagatcaattactagctcagatttttctgatctgaacaaataactacccgggaggcaattcagttcacagcacccaaccagcacaaattgttacaaccagagataaagcaataccgagctgttagcaaaagtaagtgtgcagctttgcaccactcccacagcggagaccaatccagtgtgtgccccttctggtggaagggtactcatgcttggttggctgacttctgaagtgtagtgactcatgatgatgacgtcaaaagctcaatccatttgcccaagtttgccactcatagaatcagttgtttagtaccaagcgacaggcaggcgtatttctacttgtaggaaccaaagacattggaaacacttttctggccctaagattgaaatccgttaatattgttggtgataggtgtttccatggcaacctataatctaattctgctccctctaccatctttgaatagattgcagagaaatctggctctctggtactgacacaaaagctttataactttaactaaaccaaatcacaggcgccagcaaaagctgccattcccctgctgtaactctgttccactggcgcccagtctcttactggtctttcatgttagatggctttggactgacgggtagccatgggttcatctgtcatgtctgcttctttttatatttgtttatgatggtcacagtgtaaagttcacacagctgtgacttgatttttaaaaatgtcggaagatgcagcaagctaacgattaaaatccgtcaggcta

SEQ ID NO: 629 - DNA, 1628 bp, Homo sapiens; identical to SEQ ID NO: 628

SEQ ID NO: 630 - DNA, 2169 bp, Homo sapiens
tgaggaggtgagccagctgcaggctacccttgcagagcaacgatggagaaagaggatcaagagaagacagggaagctgaccctggtccttgccctggcaactttcctagctgcctttggctcctccttccagtatgggtacaacgtggctgctgtcaactcgccctcagagttcatgcagcagttctacaatgacacctactacgacagaaacaaggagaacattgagtccttcaccctgacgctgctgtggtccctgactgtctccatgttcccctttggaggttttataggatctctcatggttggattcttggtgaataacttgggcagaaaaggggccttactgttcaacaacatattctccatcctgccggccatcttgatggggtgcagcaaaattgccaaatcctttgagataataattgcttccagacttctggttggaatatgtgcaggtatatcttccaacgtggtccccatgtacttaggggagctagcccccaaaaacctgcgaggggctcttggagtggttcctcagctcttcatcactgtgggcatccttgtggcccagctgtttggccttcggagtgtcttggcaagcgaggaaggctggccaatcctcctgggtctgactggagtccctgccggcctgcagctcctcttgctgcccttctttcctgagagcccccgctacctgctgattcagaagaaaaatgaatcagctgctgagaaagcccttcagacccttcgaggttggaaagatgtggacatggagatggaggaaatccggaaggaggatgaggctgagaaggcggcaggcttcatctctgtgtggaagctgttccgcatgcagtccctccgctggcaactcatctccacgatcgtcctcatgaccggccagcagctgtcaggagtgaacgcgatttactactacgctgaccagatctacctcagcgcaggggtgaaaagcaacgacgtccaatatgtgacggctgggactggggccgtcaacgtgttcatgaccatggtcacggtttttgtggtagagctttggggacgtcggaatcttctcctcatcggcttctccacctgcctcacagcttgcatagtgctgacggtcgcactggcactgcagaacaccatctcctggatgccctatgtcagcatcgtctgtgtcattgtctacgtcataggacacgccgtggggcccagtcccatccctgccctgttcatcaccgagatcttcctgcaatcctctcgaccatccgcctacatgatcggaggcagcgtccactggctctctaacttcatcgtgggcctcatcttcccgttcattcaagtgggccttggtccttacagcttcatcatctttgcgattatatgtctcctcacctccatctacatcttcatggtcgtcccagagaccaagggcaggacgtttgtcgagatcaaccagatttttgccaagaagaacaaggtatcggacgtatatccggagaaggaggaaaaggagcttaatgacctcccacctgctacccgggagcagtagcagagccaggccaccaggcagtatggccagtctgcatgggcctcctgtctagactttggttctgggttcttagtgtctgtgacactgggagggacacgagcctggcggggaatggcagccctccactcagtggggacacctgacgggctttcgtgcttccgtgctgtccctaaccatagaggccagtcacgggctcttggtcacacacaaagccatacctggcctttgctgggttgactgtggcgagggtcttgtaacattgcttttctaacaaaaacagttgccgagagacaagacgtgacggtcctattttttttttaactttttttttctattcttttttttttttttttttcggagctggggattgaacccagggccttgcgcttgctaggcaagcgctctaccactgagccaaatcccttgtgtggctcctcccatgggcgtggagagaccactggcatctgctggtgattgatgtggtcctctttttctgacccagccatgtcacaaagctgaggaacaggccacttggggagacacacggagcgtgaattatcaactgtcaacgacagtattctgtttagccaataaaacagatctgatcacttcttaaaa

SEQ ID NO: 631 - DNA, 2070 bp, Homo sapiens
ctgagttctgagcgtctacagcgaaagtgctgggctttggaaaggagacctgggctccgaatcctctcagggccttggacgtctctgacccaaaacaatccaaggttcttatttgaagaccaccatcccagaagcacattctcgagttgaaaagttggagtggtgttcgaaatgaatctgattgggccctcccatttacaagccacggacgagtttgctctttctgaaaacttatttggagtgctaacagagcacgcggcaggtcctctggggcagaatctggacttggaatcgtactccccatacaacaatgtgcagtttcctcaagttcagccacagatctcctcctcgtcctattattccaacctgggtttctacccgcaacaaccggaagactggtactctcctggactctatgaactcaggcgaatgcccactgagagtgtgtaccagggagagactgaggtatccgagatgcctgtgacaaagaagccgcgaatggccgcctcatcggcgggaagaataaaaggggatgagctgtgtgtggtctgcggagacagggcctctgggtaccattacaacgcgctcacctgcgagggctgcaaaggtttcttccgaagaagcatcaccaaaaacgccgtgtacaagtgtaagaacgggggcaactgcgtgatggatatgtacatgcgtcggaagtgccaggattgccggctaaggaagtgcagagagatgggaatgttggctgaatgtttgttaactgaaattcagtgtaaatctaaacggctaaggaaaaatgtgaagcagcatgcggatcagacagtgaatgaggacagcgaagggcgtgacttgcggcaagtgacctccacgaccaagctatgcagggagaaaactgaactcactgtagaccagcagaccctcctggattatattatggactcatacagcaaacagagaatgccacaggagatcacaaataaaatcttaaaagaagaatttagtgcagaagaaaattttctcatattaacagaaatggctaccagtcacgtacagattctcgtagaattcacaaaaagacttccagggtttcagacactggaccacgaagaccagattgctttgctcaaagggtccgcagtcgaggccatgttccttcgttcagcggagattttcaataagaaacttcctgccggacacgcagacctgttggaagaaagaattcgaaagagcggcatctccgatgagtacataaccccgatgtttagtttctataaaagtgtcggggagctgaaaatgacccaggaagagtacgctctgctcacagcaattgtcatcctctctccagacagacaatacataaaggatagagaggcagtggagaagcttcaggagcctctgctcgatgtcctacaaaaactctgcaagatctaccagcccgagaaccctcagcatttcgcctgcctcctgggtcgcctgacagaactccggacattcaaccatcaccacgctgagatgctgatgtcttggagggtgaatgaccacaagttcaccccgctcctctgtgagatctgggatgtgcagtgaaggacacggggagaggctagctccttgtcctcctcagagcagcaacctggtattggacttcccttcttttcatttgtaccaggtctcactcaagaatctcaatgaatatttatgtggcaattatacaattcccacaactgtaaatacaggctccatagaattgcttcccctacactgtattttacaaggcttcgggaaaccccactgacacgccctttttgcctcattaaatcaattgttacttcaattttgtcaactgagctagggaccgcctcgttttatcctccatgcggcaacattatatatatatatattttatcaaatagctgttttctcttccttttttttttttttttttttcggagctggggactgaacccagggccttgcgcttgctaggcaagcgctctaccactgagctaaatccccaacccctattaaatagctgttttcaactgagacaataaactgaacgtaatgccaagagaa

SEQ ID NO: 632 - DNA, 2413 bp, Homo sapiens
cttccgggctcgggagccgcgacaggagggggcctctgaaaagggtcctgttctgagaagtccattgtgtaccttgtcaccagcgcgtctgaaccctctctgaaccttcctgaagctggaagatttcaccctgatggctgactcaaaaccactcagaaccctggatggggaccctgtggctgtggaggctttgctccgggacgtgtttgggattgtcgtagatgaggccattcggaaggggaccaatgcctctgagaaggtctgcgaatggaaggagcctgaagagctcaagcagctgctggacttggagctgcagagccagggcgagtctagggagcggatcctggagcgctgccgggctgtgattcattacagtgtcaagactggtcacccccggttcttcaaccagctcttctcaggattagatccccatgctctggccgggcgcatcattacggagagcctcaataccagccagtacacatatgagattgcccccgtgtttgtgctcatggaagaggaggtgctgaagaaactccgtgcccttgtgggctggaacactggggatggggtcttctgtcctggtggttccatctctaacatgtacgccataaacctggcccgctttcagcgctacccagactgcaagcagaggggcctccgggccctgccacccttggccctcttcacttcaaaggagtgccactactccatcaccaagggagctgcttttctgggacttggcaccgacagtgtccgagtggtcaaggctgatgagagagggaagatgatccctgaggatctggagaggcagatcagtctggcagaggctgagggctcggtgccatttctggtcagtgccacctctggtaccaccgtgctaggggcctttgaccccctggatgcaattgccgatgtttgccagcgtcacgggctgtggttacacgtggatgccgcctggggtgggagcgtcctgctgtcccggacacacaggcatctcctggatgggatccagagggctgactccgtggcctggaaccctcacaagcttctcgccgcggggctgcagtgctctgctcttcttctccgggacacctcgaacctgctcaagcgctgccacgggtcccaggccagctacctcttccagcaagacaagttctacaacgtggctctggacaccggagacaaggtggtgcagtgtggccgccgcgtggactgtctgaagctgtggctcatgtggaaggcgcagggtgggcaagggctggagtggcgcatcgaccaggcctttgctctcactcggtacttggtggaggagataaaaaagcgggaaggatttgagttggtcatggagcccgagttcgtcaacgtgtgcttctggtttgtgcctcccagcctgcgggggaagaaggagagcccagattacagccagaggctgtctcaggtggcccctgtgctcaaggagcgcatggtgaagaagggaaccatgatgatcggctaccagccccatgggacccgggccaacttcttccgaatggtggtggccaaccccatactggtccaggccgatatagacttccttctgggcgagctggagcgtctgggccaggacctgtgagctgcttcctctctctgccccacccaagctctgcataagctcctgggttcccaaaagcgacctttctaggaaacagtggccttgactgtgtgagcccccacacactaactctcctagctaagtattggctgccaggacggtgtctaagcacactacagtctgttcttacgaaatgtgcttcttttaagtcggtcatagtggtacacaccgttaataccagcactggggaggcagaggcagacacaagcagatctcttgagtttgacgccagcccggtctacagagctggcctacacagaaaaaaaacctgtcccaaaaaaaaagaaaggaaggaagtaagaaaggaaaagaaagaaatatttttcattaagattatgtctataaaaaattgttattaatatgagagatatggtacgatgtattaagaaagctagatatgggggttggggatttagctcagtggtagagcccttgcctaggaagcgcaaggccctgggttcagtccccagctccgaaaaaaagaaccacaaaaaaaaaaaaaaaaaaaaaaaaaagaaagctagatatgagtttatatatcatggtatctgagttagactaaaaaaaaaaaatacataggaaaaggcggtgagtggaactgtgccaaaggtcagcagttttccctggaggaggataacaggctgttcctaagtcagcctctcagaccttccctgcttccccactttattatgtaaccacatcacctacttctgagatataacaataaagctttgtcactataaaaaaaaaaaaaaaaaa

SEQ ID NO: 633 - DNA, 2413 bp, Homo sapiens; identical to SEQ ID NO: 632

SEQ ID NO: 634 - DNA, 1980 bp, Homo sapiens
ggcacgagggaacgtctaggcaacgtggtctccccgcccgcgggtaggcaaaggcgtttgcgcttcccagcgtctgaggcctagggagccttcagtagccgaaagttagtcttttgcagtggagtaagggctcgcggttagccgcgtagcgcccggatctggcctcaccatgttggtcctatttgaaacgtccgttggctacgccatctttaaggttctgaatgagaagaaacttcaagaggttgatagtttgtggaaagaatttgaaactccagagaaagcaaataaaatagtaaagctaaaacattttgagaaatttcaggatacagcagaagcattagcagcgttcacagctctgatggaaggcaagatcaataagcagctgaaaaaagttttgaagaaaatagtcaaagaagcccatgaacctctggctgtagctgatgctaagctaggaggggtcataaaggaaaaattgaatctcagctgtatccatagtcctgttgttaatgaacttatgagaggaatacgatcacaaatggatggcttgattcctggggtagaaccacgggagatggcagccatgtgtcttggactagcccacagcctatctcgatacagattgaaattcagtgctgataaagtagacacaatgatcgttcaggcaatttccttgttagatgacttggataaagaactaaacaactacattatgcggtgtagggaatggtatggctggcattttcctgagttagggaaaattatttcagataatttgacatactgcaagtgtttacagaaagttggagacaggaagaactatgcatctgccactctttctgaattcctgtcagaggaagtagaagctgaagtgaaagcagctgcagagatctctatgggaacagaggtttctgaagaagatatttgcaacattctacatctgtgtactcaggtcattgaaatttctgaatatagaactcagctgtatgaatatctgcaaaaccgaatgatggccattgcacccaatgttacagtcatggttggggagttggttggagcgcggcttattgctcatgcaggttctcttttgaatttggccaagcatgcagcttctacagttcagattctgggagcagaaaaggcacttttcagggccctcaaatctagacgagacacacctaaatatgggcttatttatcatgcttctcttgtaggccagacgagtcccaaacacaaaggaaagatttcacgaatgctggcggccaaaactgtgttggctatcagatacgacgcctttggtgaagattccagctctgcaatgggagctgagaacagagccaaattagaggccagattgaggattttggaggacagagggataagaaaaataagtggaacgggaaaggcattagcaaaagcagaaaagtatgaacacaaaagtgaagtgaagacttacgatccctctggtgactccacacttccaacttgttctaaaaaacgcaaaatagaagaggttgataaagaggatgaaattactgaaaagaaagcaaaaaaagccaagattaaaattaaagctgaagtagaggaggagatggaggaggcggaggaagaacaggtagtagaagaggagccgactgtaaagaagaaaaagaagaaggataaaaagaaacacataaaggaagagccactttccgaggaggagccatgcaccagcacagcagttcctagtccagagaaaaagaagaaaaagaaaaaaaagaaagatgctgaagactaatgtaaaggaaccgtaatcctgtcacctgaacacatcatgcttaagattcagttgggagcatatcagacgctctaacataatcaagggaggttgattagctttagcttttcaaacctttttgtgtcttgacatcaactgttaaccttagagtctttgatacacaaataaaaatattttctttgtattataaaaaaaaaaaaaaaaaa

SEQ ID NO: 635 - DNA, 1830 bp, Homo sapiens
ctccggaaggagcggcagaatagtggcggcgatttctgcgtcgagcatttggagtttcttcgctgctgaacgggtagactaaacggcggcgacatggtggaggaggtacagaagcattctgtgcacacactagtgttcaggtcattgaagaggacccatgacatgtttgtggctgataatggaaaacctgtgcctttggatgaagagagtcacaagcggaaaatggcaatcaagcttcgtaatgagtatggccctgtgctgcatatgcctacttcaaaagagaatcttaaggagaagggacctcaaaacgcaccagattcatatcctcataagcagtatcctgccaatcaaggacaagatgttgaatatttggtgacaggtacacatccatatccaccaggacctggtgttgccttgactgctgatactaagatccaaagaatgccaagcgagtcagccgcacagtccttagctgtggcgttaccgtctcagaccagagttgatgcaaatcggactgcgcctgctggaagtgaataccgacacccaggggcttctgaccgttcccagcccacagcaatgaattctatgattatggagaccagcaataccaagaactctgcattaatggctaaaaaagcccctacaatgcccaaaccccagtggcacccaccgtggaaactctacagggttatcagtgggcatcttggctgggttcggtgtattgctgtggaacctggaaatcagtggttcgttactggatctgctgacagaactataaagatttgggacttggccagtggcaaattaaagctgtcattgactggccacatcagcacagtacgcggtgtgattgtgagcacgaggagcccttacttgttctcttgtggagaagacaaacaagtgaagtgttgggatcttgaatataacaaggttatacggcactatcatggccatctaagtgcagtgtatggtctggatttgcatccaacaatcgatgtcctggtcacttgtagtcgagattctactgctcggatctgggatgtgagaactaaagccagtgtgcacactttgtctggacacacaaatgcagttgctaccgtgagatgccaagctgcagagccacaaattattactggaagtcacgataccacaatacgattatgggatctggtggctggaaagacacgagtcacattgacgaatcataagaagtcagtcagggctgtggtcttacatccgctacattacacatttgcatctggttctccagataacataaagcagtggaaattccctgacggaggcttcattcagaatctctctgggcacaatgcaattattaacacgctggcagtcaatacggatggagtacttgtatctggagctgacaatggcactatgcacctttgggactggagaactggctataattttcagcgcgttcatgctgctgtacagcctgggtctttggacagtgaatcaggaatattcgcttgtgcttttgatcggtcagaaagtcggttactaacagctgaagctgataaaaccattaaagtttacagagaggatgagactgcgacagaagaaactcacccagtcagctggaaaccagaaattatcaagagaaagagattttagtgtcctcatggctgtcctgttcatagcttggtgttgctgaggatgtccagtcattcatggatgctcacttgcagaaaacatggctgctttgtattttacaataaactgctccccatgtccaaaaaaaaaaaaaaaaaaaaaaaaaaaaaaaaaaaaaaaaaaaaaaaaaaaaaaaaaaaaaaaaaaaaaaaa

SEQ ID NO: 636 - DNA, 2192 bp, Homo sapiens
gtcaagtcgtctgatcctcctgatcactggaatcatggtccatgggtacaaaggggtccagttccaaaattgggcaaagacctatggttgcagtccagaggtgtactaccagcccacctccgtggaggaggtcagagaggtgctggccctggcccgggagcagaagaagaaagtgaaggtggtgggtggtggccactcgccttcagacattgcctgcactgacggtttcatgatccacatgggcaagatgaaccgggttctccaggtggacaaggagaagaagcaggtaacagtggaagccggtatcctcctggctgacctgcacccacagctggatgagcatggcctggccatgtccaatctgggagcagtgtctgatgtgacagttgctggtgtcattggatccggaacacataacacagggatcaagcacggcatcctggccactcaggtggtggccctgaccctgatgacagctgatggagaagttctggaatgttctgagtcaagaaatgcagatgtgttccaggctgcacgggtgcacctgggttgcctgggtatcatcctcaccgtcaccctgcagtgtgtgcctcagtttcaccttcaggagacatccttcccttcgaccctcaaagaggtccttgacaacctagacagccacctgaagaggtctgagtacttccgcttcctctggtttcctcacactgagaacgtcagcatcatctaccaagaccacaccaacaaggccccctcctctgcatctaactggttttgggactatgccatcgggttctacctactggagttcttgctctggaccagcacctacctgccatgcctcgtgggctggatcaaccgcttcttcttctggatgctgttcaactgcaagaaggagagcagcaacctcagtcacaagatcttcacctacgagtgtcgcttcaagcagcatgtacaagactgggccatccctagggagaagaccaaggaggccctactggagctaaaggccatgctggaggcccaccccaaagtggtagcccactaccccgtagaggtgcgcttcacccgaggcgatgacattctgctgagcccctgcttccagagggacagctgctacatgaacatcattatgtacaggccctatggaaaggacgtgcctcggctagactactggctggcctatgagaccatcatgaagaagtttggaggaagaccccactgggcaaaggcccacaattgcacccggaaggactttgaggaaatgtaccccacctttcacaagttctgtgacatccgtgagaagctggaccccactggaatgttcttgaattcgtacctggagaaagtcttctactaaagcaggagtggaaacaaaccaccctgacccctcacacttctgctgcccccgggggtctggggagcagagaagtgcctcacaagcacaatgggaactgacctctcctcctgaccacaaagaaaggctgggctctgggcgggtcctctctgccttcggcatcatttcccttacatccaggcaagaagtggcctctcactcaaattcctgttagcatttccatgggtcacacataaactgcaatcctctcaggagaagggggatccctgatacatcatatctatccagactaaggatgtggttcttcctagattctatggctccaccaggtatagagagattcctggggcctgcagttctccatccctcttcagaagggagggatcccttggcgagagtttggctcagaggtggcatgaagcatgctctgctctctcttacccttgaaggtccttcggatgcccagagatgtctgctggtcctgggcaagccatcattcaaacgggtccaacctggccttctgtctgccatggcctgaccctcgcagtgtctcttccagaggtgtttagagtggaactcgcttcaacctcttaaccagttgctgatccctgtgtttctctcccttctccttggagactactcttggagggggatcccaccatgtccttggctttccctgggtattgttctcctcttcctcttcacaaatatgatttcagtttgatttgtggcctttctggagtgttccttggagaaccaagatgttccagctactttgtaagaattaaaaggcactgaagatgttaaaaaaaaaaaaaaaaaaaaaaaaaaaaaaaaa

SEQ ID NO: 637 - DNA, 751 bp, Homo sapiens
tccggcccgggacattgcactaccctgcaagctgtgttgcagggcccggaaggctcactgttccgaaatggccgagcagtcagacaaggatgtgaagtactacactctggaggagattcagaagcacaaagacagcaagagcacctgggtgatcctacatcataaggtgtacgatctgaccaagtttctcgaagagcatcctggtggggaagaagtcctaagagagcaagctgggggtgatgctactgagaactttgaggacgtcgggcactctacggatgcacgagaactgtccaaaacatacatcatcggggagctccatccagatgacagatcaaagatagccaagccttcggaaacccttatcactactgtcgagtctaattccagttggtggaccaactgggtgatcccagccatctcagccctggtggtagctctgatgtatcgcctctacatggcagaagattaacctgtctgtccgaagccaaggaaggaaaagactgccccagagaggggagaaaagaagccagtgttaatcacttccactgacagaaaccctccccctgagaatgtaattgtaatatatctgtctccctctcctcctatgctaggagaacaaagatgggactctttgtactcttaaactttcaaatgtgcctttttactcaacttcattttgacatttcttcactacgtaatttacttattgtaaacatgatctttttaaataatatctggcttgtaaagt

SEQ ID NO: 638 - DNA, 2715 bp, Homo sapiens
ccgccacccgcaaccatggcgaagcccttgaccgaccaggaaaagcgacggcagatcagcatccgcggcatcgtgggcgtggagaacgtagcggagctgaaaaagggcttcaatcgtcacctgcacttcactctggtcaaggaccgcaatgtggccaccccccgcgactactacttcgcccttgcgcacacagtgcgcgaccacctggtggggcgctggatccgcacacagcagcactactatgacaagtgccccaagagggtgtattacctctctctggaattttacatgggccgaacattacagaacaccatgatcaaccttggcttacagaatgcctgcgacgaagctatttaccagctcgggctggacatggaggagttggaagaaattgaagaagatgctgggcttggcaatggtggtcttgggaggcttgctgcctgcttcttggactccatggcaacgctggggcttgcagcctatggatacggcatccgttatgaatatggaatcttcaatcagaagatccgagaagggtggcaggtagaggaggcagatgactggctcaggcatggaaacccttgggagaaggctcgtcctgaattcatgctgcctgtgcatttctacggaagagtagagcacacccaggcaggaacaaagtgggtcgacacccaggtggtgctggctttgccgtacgacacccccgtacctgggtatatgaacaacacggtgaacactatgcgcctctggtcggcccgagcacccaatgactttaaccttcaagactttaatgtcggagactacattcaggctgtgctggaccggaacctggctgagaatatctccagagtgctgtaccccaacgataacttttttgaagggaaggagctgaggctgaagcaggagtactttgtggtggctgcgaccctgcaggatgtcatccgacgtttcaaggcctccaagttcggctccaaggatggtgtaggaaccgtgtttgatgcttttccagatcaggtagccatccagctgaatgacacacatcccgcactcgccatcccggagctgatgaggatctttgtggacattgaaaaattgccctggtccaaggcctgggagatcaccaagaagacctttgcctacaccaaccacacggtgctcccggaggccctggagcgctggccagtggacctggtggagaagctgctgcctcgacacttgcagatcatttatgagatcaatcagaagcatttagatagaatcgtggccctgtttcctaaagacatcgaccgcatgcggcggatgtctctcatcgaagaggaaggaggcaaaaggatcaacatggcccacctctgcatcgtgggctgccacgcggtgaacggggtagcgaagatccactcggacatcgtgaagacccaagtattcaaggacttcagtgagctagaaccagacaagttccagaataaaaccaacgggatcaccccgaggcgctggctcttactctgcaacccagggctggctgacttgatagcagagaaaattggagaagactatgtgaaagacctgagccagctgacgaagctccacagcttcgtgggcgacgacatcttcctccgggaaatagccaaagtgaagcaggaaaataaactgaaattctcccagttcctggaaaaggagtacaaggtgaagatcaacccatcttccatgtttgacgtgcacgtgaagcggatccacgagtacaaacgacagcttctgaactgcctgcatgtgatcaccatgtacaatcgcatcaagaaagaccctaagaagttcttcgtgccaaggacagtcataattggtgggaaagctgccccaggatatcacatggccaaaatgatcataaagctggtcacctccgtggcagaagtggtgaacaacgaccctatggttggcagcaagttgaaagtcatcttcttggagaactacagagtgtctcttgctgaaaaagtcattccagccacggacctgtcagaacagatctccactgctggcacggaagcctcggggacgggcaacatgaagttcatgctgaacggggccctgaccatcgggactatggatggggccaatgtggagatggcggaggaggccggggaggaaaacctgttcatctttggcatgagggtagatgatgtggccgctctggacaagaaagggtatgaggccaaagaatattatgaggcccttccagaactgaagctggtcattgaccaaattgacaatggcttcttttctcccaatcagccagacctcttcaaagacatcatcaacatgttattttatcatgacagatttaaagtctttgcagactacgaagcctatgtcaagtgtcaagaaaaagtcagtcagctgtatatgaatcaaaaagcctggaacacaatggttctcagaaacatagctgcctcggggaagttctccagtgaccgaacaatcagggagtatgccaaggacatctggaacatggagccttccgatctgaagatctccctatctaaggagtccagcaatggggtcaacgccaatgggaagtaaatgctaaaatatattcttattcaataacttcttactggacttgagtactcttagagcttccctgagtctgttttgttattgaatggttagtaaatgtatttctgtattagagctaaaaataaaatgtcaacttcgagttgtcaaaaa

SEQ ID NO: 639 - DNA, 2715 bp, Homo sapiens; identical to SEQ ID NO: 638

SEQ ID NO: 640 - DNA, 3711 bp, Homo sapiens
gaagctgctgcacctggagcacccacccctctgtagaggggagttgatcagaggcccacataaccgtaattacttgtgagcctctgattatagtacaacttgctggattagctcaccggattagccgctcaggtaacactcatttgactggggaaacccatgactcagctatcttttgggtaaataatttaacagtgagcccagcggagtattctccacgggtcagcctcagaagtgcctctgtctgttaagagaagccagggtgattggaggatcagcccgccagcaagctgctgcccccagatattgcaaagcctacagagccggcctggtgtcccagattagccaaagagcctggtgtgacaggatggatgcttctcctgagcccccgcagaagggcgggacactggtactggtccgacggcagccccctgtgtcccagggcttgctggaaacactgaaggccaggctgaagaagagctgcacctgcagtatgccatgcgctcaggctctggtgcaaggtctgtttcctgtcatacgctggctgccccagtaccgccttaaggaatacctggcaggtgatgtcatgtcgggattggtcattggcattatcctggtgccacaggccatagcctactcactgctggctgggttgcagcccatctacagtctctacacttccttcttcgccaaccttatctacttcctcatgggtacctcccgccacgttaatgtgggcatcttcagcctgctgtgtctcatggtgggtcaggtggtggaccgagaactccagttggctggctttgacccctcccaggattctctagggcccgggaacaatgacagcaccctcaacaacacagccacactgacagttgggctacaggactgtgggcgggactgccatgccattcgtatcgccactgccctcactctgatggccgggctttatcaggtcctcatggggatcctccggctgggcttcgtgtctacctatctctcgcaacccctgctcgatggctttgctatgggagcttctgtgaccatcttgacttctcaggctaaacacctgctgggcgtgcggatccctcggcaccagggcctaggcatggtgatccacacttggctgagcttgctgcagaacgtgggacaggctaatctgtgtgatgtggtcaccagtgccgtgtgcctggcagtgctgctgacagctaaggaactctcggatcgctatcgacactatctgaaagtgccagtgcccacagagctattagttattgtggtggccacgattgcgtcccattttggacagctccatacacggtttggctcgagtgtggccggcaacattcccactggttttgtggccccacagataccagaccctaagataatgtggagtgtggccctggatgccatgtccctggccctcgtgggctcagccttctccatctccttggcagaaatgtttgcacgtagtcatggctactctgtcagtgccaaccaagagctgctagctgtgggctgttgcaacgtgctgcctgccttcttccactgttttgccactagtgctgctctgtccaaaactctggtgaagatagccactggctgccagacccagttgtccagtgtggtcagtgctgctgtggtgttgctggtgctgctggtgctggcgccattgtttcacgatctgcagcggtgtgtgttagcttgcatcattgtcgtcagcctgaggggggcgctgcgcaaggtgaaggatctcccacaactttggcggctaagccctgcggacgcactggtctgggtggctactgcagcgacctgtgttctagtcagcatcgaggctgggctgttagctggggtgttcttctcactgctcagcctggcaggccgcacgcagcgtccacgggctgcccttctggctcgaattggagactcgaccttctatgaggatgctgctgagtttgagggcctcctgcccccgcccgaggtgcgagtgttccgtttcacaggtccgctctactatgccaacaaggatttcttccttcggtcactctacagtctgacagggctggatgctgggtactcagccaccaggaaggatcggggcacagaggtgggtgtcagtaacagaagtcttgttgaccgcaaggatctgggttcagtgagcagtggggatgggctggttgtacccctggcatttggtttccacacagtggtcattgactgtgcaccactgctgttcctggatgtggctggcatggccacattgaaggacctgcgcaaaaactacagggccctggacatcaccctgcttctggcttgctgcagtccctcagtgagagacacactgagaaaagggggcttccttggggaagaccagggaactgcagaggagctgctgttccccagtgtacacagcgctgtggagacagcatgtgcccgccgtgaggagctgatggctgctgactctgccctctagcagggcccgcttcctcaagagccaagacctgtgtccacgagccagtcctgagctcttttgtaggagtgacatgaatgataaagtcattatagataaatccttggaccgcctttgccctggagaagccagggaactccaagtaggaaaggaaagtgcagtacccttaacacattggaggattccaaacattcagtgattgaggcgctctacctctgagcccactgctgccccctggtgcctattcaaccctagtagttgcacccacacacatgattccctcagccaacacagtgcccagtttgatagtctgtttatgttgtcatctgaaacagagtcctgcaaattatatgacctccatgatgccaaaaggacactttcccattccctgaaccatcgggtaccagatgtgagctggatatgtggccacacctcaagggtctgaatttccgaaaggcctccttaggcctggtgctcatcttgattggacccttgcaaaggcagccacctgctccagagtcacagtccagtgtcactgtctaaccgatgtgactgacataacctcaacctgactttcgggcacaatgtcccaatacagcttatactggtaaccacaacgtggcgtatgtatggtacaaagccaggcacagtagacacttaccccattctgctgtacttctaagaaaacctcaggaggaaaccacctgtgctccatccagggcctgcctttggcacagccaagcagacattcccctcctcctctgcccaacaggatgctctaactggaagcacaccccagccctgtgcactaccatgattctcccccacccacagcccagcattgtgttccacagctggccccaaaaacgtcagctccaccatctcggctctcttaaaacaagctctgaccagcaattcccagggtacccatttcagcgtcacccacctggctgtgatgaggtccagcagccagtgtatccggacctgctcaatgccactgtgaggcacagcacctatgtaggcaaggttcagttgctggtcccaactaaggtcgtactggtcagcctggtcgtgaggcagtggggggctagggataggacaaagaagtgaagtgtttgtcctaagcaggggcctgcatcataccagactttacacatgttatcacctgactacctagacccttgaggatgaactgtgtatctccagaatgtatgataaagtagcccactaaccag

SEQ ID NO: 641 - DNA, 1758 bp, Homo sapiens
gggggcccccgctgagtggacgacgtggaagttgctggctgaccaggcttggaggagtcgtcttcggaatcggagtctgggaacagtggacgtggcggcgccccggctcaattaggagtcgctgccgagtcccggcctgtcactgaggatcggcgagggcgcggcggcggtccatcatgggtggctttttctcaagtatattttccagtctctttggaaccagggaaatgaggattttaattttgggattagatggtgctggaaaaacgacaattttgtacagattgcaggttggagaagttgttactaccattcccactattggatttaatgtagagacggtgacatacaaaaatctcaagttccaagtttgggacttaggcggacagacaagtatcaggccatactggagatgttattattcaaacacagatgcagtcatctatgtcgttgacagttgtgaccgagaccgaattggcatttccaagtcagagttagttgccatgttggaggaagaggagctgaggaaagccattttagtggtgtttgcaaataaacaggacatggagcaggccatgacgccctcagaaatggccaatgcgcttgggttacccgccctgaaggaccggaagtggcagatctttaaaacgtcagcaaccaaaggcaccggcctcgacgaggcaatggaatggttagttgaaacactgaaaagcagacagtgagtccattcacatcagcgcctgtgaaccaaacgctccgtcacagactcactgaaccagtcagatgtacttctcgtgactggtggaagggactgtgtgattctagcatatacagacctgacttcactatttgtaataaatataaaaagcaagtatctggtgagagggttagcttgatcgaatcacccaaatggtttatgtaatgtaaaatatttcttccttgttttcttgtgttaaggtatatattctatttgtatggaattcttactcagatacagttctattaaagaatgtacactcttgggggaaccgtcctacttttaaattagtggtttcatcttgtttgtataaacactaatatttagctcagactctttcccctaaaatgaattaaggcgttccaaagatgagtcttagcaaagtagattagaaacagagcgtatggtcgtcatttgcttagcagactcactttactgactcacattatcttacaataataacgcttcatcagaagcgttttctgtattgacctgaactttgtgcaggaactctgtaaggaaggtggggttctgctagattgctttgccagccctacagtgaggtgttatagggttcagagtcaggcttgtgggtcaggaactgtcctaaatcagactgtatctggaaatgccaacactgggagcatagacagacaccacagtgtggtggcacacgcctgtaatcctaggactcaggagacagaggcaagaagaccaagaattcagctttgtggtgagtctgaggccggcctgggcagcttgaggctatgtctcaaaacaaaacagaaaaccaaccaaccaaccaaccaaaacattcatgctcaagttgttacggatattcaaagtaatgtttgtatgaactcttgtctatgctagtaaaatgatacagaaggatcccaaagggctgtttgaggagttcaccacacaatacaaaaactgcacatgaaaagaaataaaaatcagttttaataaaaaaaaaaaaaaaaaaaaaaaaaaaaaaa

SEQ ID NO: 642 - DNA, 2737 bp, Homo sapiens
gccgccgccgactggcgggcccggtgggctccgagtcagctcactgccttcaccaatcacagggcgcggctcacgaaatccacttcggattggtagtctgtgacctcacgtcacctgggggcggtgcttcaggcagacacttagggcgctgctggagctcgtgaatcaaccgcccggatcccgcacgcagagtgttactcagcatatgggcaaggattgatcagaccttgggggacttctgaacctggacattttgagagccacttttgagaaagacaacatcattctattgtgaaacctgtggcccagaggtcaaagaacctgcggtgggcgatcaggtactgagaaagctaccaaggttgcctgctctactcagcacttgagccctggtgggggtctatctttctggaaggatctgagcctctcctccttccctcagatcctgatggcttcaaagtcccagcacaacgcttccaaagccaagaatcacaacgtcaaggctgaatctcaaggacaatggggccgtgcctgggaagtggactggttctccctggtcagcgtcattttcctgctgctcttcgcaccgttcattgtgtactacttcatcatggcatgtgaccagtacagctgctcgctgactgcccccatattggacgtagctacaggccgtgcgagtctggcagacatctgggccaagacaccgcctgtgacagctaaggctgcccaactgtatgccttgtgggtcagcttccaggtgctgctttactcctggcttcctgacttctgccacagatttctgccaggttatgtgggaggcgtccaagaaggtgccataactccagcagggattgtaaataagtatgaggtgaatgggctgcaagcctggctcattacccacttcctctggtttgtgaacgcttacctcctatcctggttctcccccaccatcatctttgacaactggatcccgttgctatggtgtgccaacatcctgggctacgctgtgtccacctttgcaatgatcaaggggtacctgttccccaccagcgccgaagactgcaaattcacaggcaatttcttctacaactacatgatggggattgagttcaacccccgcatcggaaagtggtttgacttcaagctgttcttcaatgggcgcccggggattgtggcctggactcttatcaacctgtcctttgctgccaagcagcaggagctttatggccatgtgaccaactccatgattttggtcaatgtcttacaggccatctatgtgttagacttcttctggaacgaaacctggtacctgaagaccattgacatctgccatgaccactttggatggtacctgggctggggagattgcgtgtggctgccctacctctacacactgcagggcctgtacttggtgtaccaccctgtacagctctccacccccaacgccttgggcgtcctgctgctcggcctggtgggttactatatcttccgaatgaccaaccatcagaaggacctgttccgccggacagatggacactgcctcatctggggcaagaaacccaaggccatcgagtgctcctacacgtcagccgacgggctgaagcaccgcagcaagctgttggtttcaggcttctggggtgtggcccgccacttcaactataccggagacctgatgggcagcctcgcctactgcctggcttgtggcggcggccacctcctcccctacttctacatcatctatatgactatcctgcttacccaccgctgcctccgtgatgagcaccgctgtgccaacaagtatggccgtgactgggagcgctacgtagccgctgtgccctaccgcctgctgcctgggatcttctgagggccaccctggcaagcagaaagaggcgtcattgaatgtgtggagttgggtgcatgggggccagcatccggctttcccctgcaggggcctccttggtttgctcttctggaggatggagagccaggcgccccacagtgtctggctggtggcaactagagctgagttcacactgatgcctcagcagaatgactggttctccctgttcagcatcctgagggcagaggaccttggccctttcatgtctgttggaagcccaccatctatgttgtctagatagcttaggcttaccaggtgtctcccaggattgggccatgcctggtaaactggagacaatgtaggatctaaagagttttggcaatgtcaccttcactcccacctgcaatggtgggctggacccctttttctgtttgtagcgtgatcagcagagggttcaggggccattgaaggaggaaggctctttgtttaggttctttactgtttttacccgaggaatgccaagcagcggactggaatatcccactctgcacatccctggctgacttgataaagtctgtctgacatatgagatggggttcccagaactccccaagtaccccagctagcagcttatccatctcccctcttccggaaggtgcttcttgtttacccctgagacttggctcagaggtgaacagacttggctctgacaacccagaatgtatcaccagttagtggcctcagccacaccttccccaacaggagaaccagcgttggggaaggaatccattctcattagtgacactgccccccaaaactcagggttattttgtaaaactagataggctcatgttagccttgcaagcggttctttgtattaaatctgccttgttaaatgag

SEQ ID NO: 643 - DNA, 2737 bp, Homo sapiens; identical to SEQ ID NO: 642

SEQ ID NO: 644 - DNA, 1307 bp, Homo sapiens
gtgcttttgggtttggcgatcagttccgcgggagtcttgtcaggagcaggatggcggcttcgggcgaggcgcgccgagtgctggtgtacggcggcaggggtgctctgggctcgcgctgcgtacaggccttccgggcccgcaactggtgggttgccagcattgatgtggtggagaatgaagaggccagtgccagcgtgattgttaagatgacagattcattcacggagcaggctgaccaggtcactgctgaggtcgggaagctcctaggtgaccagaaggtggatgccattctctgtgtggctggaggatgggccgggggcaatgccaaatccaagtcactctttaaaaactgtgacctgatgtggaagcagagtatttggacatccaccatctctagccacttggccacaaagcacctgaaggaaggaggcctcttgaccctggccggggccaaagctgcgttggatgggactcctgggatgattggctacggcatggccaagggagccgtccatcagctctgccagagccttgcagggaagaacagtggcatgccgtctggggctgccgccattgctgtgcttcccgtcaccctggatactccgatgaacaggaaatcaatgcccgaggcagacttcagctcctggacacccttagagttcctggtggagaccttccatgactggatcactgggaacaaacggccaaactcaggaagcctaatccaggtggtaaccacagacgggaagacagagcttactccagcctatttctaagttgcacctcagtgcccaggagaaccctcttgaaactctactaacctgtgtctgtattgccgcacctggccccatgttgtctgtattcctgtttgtggtacgagataactagtcccgtttgtctcttacgtagtgctccttttttgtcctgggctggtgaggtatgtttatggggaatgagtgggggcctgtaagtagcaccatcagtgctgaggcccagggaggtatgtgtgcaggccgtcatcccagcatcccagactgctttggagacccgtttgatagttcattttttagcatttggggcactttgaaatccaacttgtttttaaattccatgttagtgccatagatgtagtttttgctgcctgaaaattaactgccatgaaaattcattggtgatgtaagtaagcaaaacctaatggactctgttggatatcatttgtgttccagcctaggctaagtgtttatgagaactattcgtgagtgttcggagtgttcttcctaataaacacatttcatgtccccgaattc

SEQ ID NO: 645 - DNA, 1307 bp, Homo sapiens; identical to SEQ ID NO: 644

SEQ ID NO: 646 - DNA, 2410 bp, Homo sapiens
tacgctgctttggtggcgtgcacctctcacggtgtgcctagccgccgatgcccaggctgcacgatcacgtctggagctacccaagcgcgggcgctgcgaggccgtacagcctcccgcgaggcatgattgcggcggccctctgtccgcagggccccggagcccccgagcccgagcccgcgccccggggccagcgagagggaaccgcaggcttcagcgcacgacccggcagctggcaccacgacctggtgcagcggagcctcgtgctcttctcatttggcgtggtcctggctctggtgctcaacctgctgcagatccagcggaatgtcacgctcttcccggacgaggtgatagccaccatcttctcctccgcctggtgggtgcccccgtgctgtggcacggcagccgctgttgtcggcttattgtatccctgtattgacagtcacctgggagaaccacacaagttcaagagagagtgggccagtgtcatgcgatgtatcgcggtgtttgttggcatcaaccatgccagtgccaaattagatttcgccaataatgtgcagctgtccctgactctggcagccctatccttgggcttgtggtggacgtttgatcgatcccgaagtggcctggggctcgggatcaccatcgccttcctagccacgctgatcactcagtttcttgtttataatggcgtctaccagtacacgtccccagatttcctctatatccgttcttggctcccttgtatatttttctcaggaggtgtcacagtgggaaacataggacgacagttagctatgggtgttccagaaaagcctcacagtgactgagtttgagcacatgattcagggcggaagcagaatgtggagacactggtcctgggtgtggtgaagaggatctttttctcaatgttccatttagactgggctgatgataaatgactcctaaagatgcgttcacgtagtctaaatagcaagtggaggcaaggactacttacctaaagtcttaccttgctcacccaccctcacacctgtctgcactggaacattctatcccaggctgtatgtgagagttgggtaagggggccggtttcccgagtattagatttcactcatcattcaaagcaaaatgccatatttcaaagccttgaatcaaaatgaattaccaactagcagttttatatcagtgcccaaaggagagaggttgatggtgcttaacagagatgaagtatgtgcagtaagaatatttatccagaattaaaatatagggttgtgtaaagaggggctaagggcagcagtaagttggaggaagatcatgctccccggaggacccagtgcagccacatctccaggtctcgctcaggctggcgctcacacgtgggtctcatcagtgtgggaactatgctgtttactgacaggaggcttgtagacaatcttactgacagcccaggacaacacaaagtcaggattctgcattgcgatgctggacttttcatctcaatttaagtgaagttttatccaagatctggagcatctaagagtgaatagctgtctgctgtttcagtcgtaatgagccgaaattgtgtctctgtcactccagagtggagaggacttttccacagccctatggagcttgcaatctgtgattgccttgtaaaaggttgagtgtgcacgtcactgcgttcggtgcgcagtgtcctgtgtgtgttggacagcgtagaacacatgggaccttgcaagtattgggtcttcaacttcaagtgcaatgtgtatgaaaccaatctgagccttgtattctcttaaatatttattatttttttttaaccgcgcgagctgttctggagaagggttctcgggtcatttcagagctgtgtgaggcacactcagcaatactgtgtcagccgtgacgctccccagtcacaccctccactacaccctagtcctttgacatactccaggtttgtaagtttagtgatttttacttacaaatttacccttttttgcattctaaaattgtgtttaaattatatggaagtacttggtgtaggcagtcattggtccccgggcagcagaagctctgcctgtggaatcgggtttgggttcactctgcagggctcctcatagaggctttgcttatttgttttgaggaaaatgtctggagtaaacctttgttttctgaaactactttagctaaaagaaaatgggtgttctagactttggaatggttcttaaagtttcctggaaataaaaataatgattggcacttcaaagacattctttagccaagacttcagtgtctagcagaaaccacaagtgactagaagagcaagtgatcttggtgatgcacttgattgtatacaatgagtattttttctcttaaactggaaataaatctgttagaaataatatagcca

SEQ ID NO: 647 - DNA, 2410 bp, Homo sapiens; identical to SEQ ID NO: 646

SEQ ID NO: 648 - DNA, 1882 bp, Homo sapiens
accctgtcaagtgtccatgatgctgggccctgagggaggtgaaggctatgtggtcaaactccgtggcctaccctggtcctgctcaattgaggacgtacaaaacttcctctccgactgcacaattcatgatggggtcgcaggtgttcatttcatttatactagagaaggcaggcagagtggtgaggcttttgttgaacttgagtcagaagatgatgtaaaattggctctgaaaaaagacagggaaagcatgggacaccggtatattgaggtgttcaagtcacacagaaccgagatggattgggtgttgaagcacagtggtccaaacagcgccgacagtgccaatgatggctttgtgaggcttcggggactcccgtttggatgcacaaaggaagaaatcgttcagttcttctcagggttggaaattgtgccaaacgggatcacactacctgtggacccggaaggcaagattacaggggaggccttcgttcagtttgcctcacaagagttagccgagaaagctttagggaagcacaaggagagaatagggcacaggtatattgaagtgttcaagagcagtcaggaggaagttaggtcatactcagatccacctctgaagtttatgtctgtgcagaggcctgggccttatgacaggcctggcacagcccggaggtacattggcattgtgaaacaggcaggcctggataggatgaggtctggtgcctatagtgcaggctatgggggctatgaagaatacagtggcctcagtgatggctatggcttcaccactgacctgtttgggagagacctcagctattgtctctcaggaatgtatgatcacagatacggagacagcgagttcacagtgcagagcaccaccggccactgcgtccacatgagagggctgccctacaaagcaacggagaacgacatttacaacttcttctctccactcaaccctgtgagagttcatattgagattggtcctgatggaagagtgaccggagaagctgatgttgagtttgctactcatgaagaagcagtggcagctatgtccaaggacagggccaacatgcagcacagatacatagaactcttcctgaattcaacaacaggagctagcaatggggcttatagcagccaggtgatgcagggcatgggtgtgtcagctgcccaggcaacttacagtggcctggagagccagtcagtgagtggctgttacggggccggctacagcggtcagaacagcatgggtggatatgattagtattgtaggaacatttgggttatttcaatcagaaaatttcacaggcagccaataaacagtcaagagcagtttataactctagaggaagctgggggacccactttgcaccatgagtttgtgaaatctggattaaaaaattacctcttcagtgtttctcatgcaaacttttcttctagcatgtaatattgagtaaactaaaaactattttcttccgcttttctcaattaacatttttggtagtatacttaagagtgatgttatctgagttaagtagtttaagtatgttgagtggatctttcagcacaccacagtgaacacactgggggcatgtacttttctggagaactcaaggtgctagatccctgatgcaaagagaagcatttctcatgttcattctagtttatattttcatttaaaatctttaggttaagtttaagctttttaaaagttagttttgagaattgagacacaatactaatactgtaggaattggtgaggccttgacttaaagctttctttgtactgtgatttccttttgggtgtattttgctaagtgaaacttgttaaattttttgttaactaaatttttttcttaaaataaagactttttcgcggccg

SEQ ID NO: 649 - DNA, 1689 bp, Homo sapiens
tcctagcaaacctgtgtgctcctgggacgcatcactaccatgagtgggtgcccattttcaggaaacagtgtaggatatactttgaaaaacttatctatggaagacaatgaagaagacggagctcaaactggtgtaaacagagccagcaaaggaggacttatctatggggactacttgcagttggagaagattttgaatgcacaagaacttcaaagtgaaatcaaagggaataaaatccacgacgagcacctctttattataactcaccaagcttatgaactttggtttaaacaaattctctgggaacttgattctgttcgtgagatttttcaaaatggccatgtcagggatgagaggaacatgctcaaggtgatgactcggatgcaccgtgtggtggtcatcttcaagctcctggtacagcagttctcggttctggaaacaatgactgccttggacttcaatgacttcagagagtacctgtctccagcatcaggcttccagagtcttcagttccggctgctagaaaataagataggtgttcttcagagcttgagagtcccttacaacaggaaacactatcgtgataactttgaaggagactacaatgagctgctgctgaaatcggagcaggagcagacgctattgcagctggtggaggcatggctggaacgcacacctggcttagagccacatggattcaatttctggggaaagtttgaaaaaaatatcttgaagggtctggaagaggagttcctaaagattcaggcgaaaaaggactctgaagaaaaagaggaacagatggcagagttccggaagcagaaagaggtgctgctctgcttgttcgatgagaagcgtcatgactaccttctgagtaaaggtgaacgacgactgtcataccgtgcactccagggagcactgatgatatatttttacagggaggagcctcgattccaggtccctttccagttgctgacctcacttatggacattgacacactcatgaccaaatggagatataatcatgtgtgcatggtgcacaggatgctaggcagcaaggctggcactgggggatcctcaggctattattatctgcgctcaactgtgagcgacaggtacaaggtgttcgtggatttatttaacctctcatcgtacctggttccccgacactggataccaaagatgaatccgatcattcacaagttcctttacacagctgagtacagcgacagctcctacttcagcagcgatgaatcagattgagttcttctgaacatcagtccaggctacaggattcccagtcaacttttattttataaatttttacaaatatgtgattggtgtaacatatttatatttgtagttcagagacgtgatgttgtggtccaatcctggaaaaaattatgatttcgcatatcatgatgatgtatgattaagcagattaagcattatgataaaaataacttggtaaaatgttagcatcatcatacatatgatgtattctggttataactcaatttaccctgacacttacctccatagaaacactttaagtaattagttccttattgcttcatactttataaagcttggtgagcagttcttttatactatagatgcaataaatactattcttctgtacaaaatttattcaaatgaatctttaattaataaatttagtttttgtctgcg

SEQ ID NO: 650 - DNA, 2095 bp, Homo sapiens
cacctgtgttccaggagccaaaccagcaatgtcttcccctgcacagcctgcagttcctgccccactggccaacttgaagattcaacacaccaagatcttcataaacaatgaatggcatgattcagtgagtggcaagaaatttcctgtccttaaccctgcaactgaggaggtcatctgccatgtggaagaaggggacaaggcagatgttgacaaagctgtgaaggccgcaagacaggctttccagattggctccccatggcgcaccatggatgcttcagagagaggacgcttgctgaacaagctggctgacttaatggagagagatcgtctgctgctggctacaatagaggccatcaatggtgggaaagtctttgccaatgcgtacttgtcggatttaggaggcagcataaaagcattaaagtactgtgcaggctgggctgacaagatccatggtcaaacaataccgagtgatggagacattttcacttttacgagacgtgaacctattggggtgtgtggccaaatcatcccttggaattttccactgcttatgttcatttggaagataggccctgccctcagctgtgggaacacggtggtcgtcaagccagcagagcaaactcctctcactgctcttcacatggcatctttaataaaagaggcagggtttcctcctggcgtggtgaacattgtccctggttatgggccaactgcgggggcagcgatctcctctcacatggatgtggacaaggtggccttcacgggatcaacccaggttggcaaattaatcaaggaagctgcaggaaaaagcaatctgaagagggtcacgctggagcttgggggaaagagcccttgcattgtgtttgcagatgccgacttggacattgctgtcgagtttgcacaccatggagtcttctaccatcaaggccaatgctgcgtcgcggcatcccggattttcgttgaggagtcagtttatgatgagtttgtgagaaagagtgttgagcgagccaagaaatatgtccttggaaaccctctgacccaaggaataaatcagggccctcagattgacaaggagcaacatgataaaatccttgatctcattgagagtgggaagaaagaaggagccaaactggagtgtggtggaggacgctgggggaacaaaggcttctttgtccagcccacagtcttctccaatgtgaccgatgagatgcgcattgccaaagaggagatatttggaccagtgcaacaaatcatgaagtttaagtccatagatgatgtgatcaagagagcaaacaatactacctatggtctagcagcaggagtcttcacaaaagacctggacagggccatcactgtgtcttctgctctgcaggccggggtagtgtgggttaactgctatatgatcttgtcagcccagtgccccttcggtggattcaagatgtctggaaatggacgagaactgggtgaacatggtctttatgagtacactgagctcaagacagttgcaatgaaaatatctcagaagaactcctaagaagcagagtgaagagaaactctcagctgtggctacacgtctcctatcgtcaccagcaaagtgttgttttactataattttttcttctgttgatttctttaacatgatgaatccatcagtgttactgttactcatagaaaacatgtagcttaatcctacaaaaccactcaccttctaatatgtgactccagtccttatcccagaataaaaggatagatttaggtgcaagctctctgtaactctgtcatgataggtgctttctgtcgtagctccctgtctagagtactcatttggtgaggaggaccagtcgtgatttaagctctgtccctctgtgaccccttgaactgcttctcggcatgcatgataactgcagagtcggctgctctgtttcccaggtgttgtgaaatgttttctagaaagccatgcctgcttatcaaatgaaatgcccagctgtaattagaatgcaaagctaataaagggacccttgcatgattttgttggtctgtaattatttgggaatcaactaggattatggcaataaactctgctggtcaaaaaaaa

SEQ ID NO: 651 - DNA, 1154 bp, Homo sapiens
cggcggcgcagagaggagcgcgggtggagggcgcggaccgaccgagcgcaccgaccatggcctccaagtgtcccaagtgtgacaagaccgtgtacttcgccgagaaggtgagctccctgggcaaggactggcacaagttctgcctcaagtgtgagcgctgcaacaagacactgacgcctggcggccatgctgagcatgatgggaaacccttctgccacaagccctgttatgccacactgtttggacccaaaggcgtgaatatcgggggcgctggttcctacatctacgagaagcctccgacggaggcccctcaggtcactggccccatcgaggtccctgtggtacgaactgaagagcggaagaccagcgggccgcccaagggtcccagcaaagcctctagtgtcaccacgttcactggggagcccaacatgtgccctcgatgcaacaagagagtgtacttcgctgagaaggtgacctccctgggcaaggactggcaccgaccctgcctgcgctgtgagcgctgctccaagacactgaccccaggcgggcatgctgagcatgatggccaaccctactgccacaagccctgctatggaatactctttggacccaaaggagtgaatactggtgctgtgggcagctacatctacgacaaggacccggaaggcacagttcagccttagatctgcagatgctgcccctcgcggtcccctatttgaccctgagggagagtgatctgctgcctagtcctgcctcagtgtgtctcgcctgcaattccagcacctaagtgatggaggagaaagcccagctagtcctagaatttcagctcccttggtcaccttggcatgtcctatgttgcccgtggtttactttctgtctgtgtgtctccatagcaccatgggtcctgtgtccccatgtccctgataactctccaaggtggctgtcctatgatatccctttgcccacactcgcccgccagtattatttatgctctgcttgccggtgatgggcatgagctagctcacagcattcccggggtgacggcaccccagcaaggagccctttgctggttcccacactactccctacttaccctcacatggttcacagctatggagatttgctgtcaataaatagtttggtttaaagattgc

SEQ ID NO: 652 - DNA, 1387 bp, Homo sapiens
cctgtgggagcagccgggtagagaggagcgtggccttctcctctccccgccatggcttgtgcccgtcccctcatatcggtgtactctgaaaagggggagtcatctggcaagaatgtcactttgccagctgtgttcaaagctcccattcgaccggatattgtgaactttgttcacaccaacttgaggaagaacaatagacagccctatgctgtcagtgaattagcaggtcatcagaccagtgctgagtcctggggtactggtagagctgtggctcgaattccaagagttcgaggtggtggcacccaccgttctggccagggtgcctttggaaacatgtgtcgtggaggccgcatgtttgcaccaaccaaaacctggcgtcgttggcatcgcagagtgaacacaactcagaaacgatatgccatctgttctgccctggctgcctcggccttaccagctttggtgatgtctaaaggtcactgtgttgaggaagttcctgaactgcctttggtggttgaagataaagttgaaagttataagaagaccaaggaggctgttcagctgcttaagaaacttaaagcttggaatgacatcaaaaaggtctatgcctcccagagaatgagagctggcaagggcaaaatgagaaaccgacggcggatccagcgcaggggaccctgcattatctataatgaagataatggaatcatcaaggccttcagaaacatccctggtattactctgcttaatgtaagcaagctgaacattttgaaacttgctcctggtgggcatgtggggcgtttctgcatttggactgaaagtgctttccggaagttggatgagttgtatggcacttggcgtaaggctgcttccctcaagagtaactacaacctccccatgcacaagatgatgaacacagaccttagcagaatcttgaaaagcccagagatccaaagagcccttcgagcaccacgcaagaagattcatcgcagagtcttgaagaagaatccactgaagaatctgaggatcatgttgaagctgaacccttacgcaaagactatgcgtaggaacaccattctccgccaggctaggaatcacaaacttcgagtgaaaaagctggaagccgcagctgctgcactggcagccaaatcggagaagattgttccagagaagggggctggagacaaaaaacctgcagtaggcaaaaaaggaaagaagcctgtggatgccaagaagctgaagaagcctgcagggaaaaaggtggttaccaagaaaccagcagagaagaaacctaccacagaagaaaaaaagtctgctgcataaactattaaaatttgttaaattccagagagcaaaaagatacagcctatttgaataaatcaaagatgcagtg

SEQ ID NO: 653 - DNA, 862 bp, Homo sapiens
cagccgcgttccggacggcagcgcgtgccccgagctctctgccttcccccgcccgtcagcccgagcccagcccgcgatcccagcagcagcccgcagagcagccccagcagcagcgccatggccgggtggaacgcctacatcgacagccttatggcggacgggacctgtcaggacgcggccatcgtaggctacaaggactcgccctccgtctgggccgctgtccccgggaagaccttcgttagcattacgccagctgaggttggtgtcctggtaggcaaagaccggtcaagttttttcgtgaatgggctgacacttgggggccagaaatgttctgtgatccgggactcactgctgcaagacggggaatttacaatggatcttcgtaccaagagcaccgggggagcccccaccttcaatgtcactgtcaccatgactgccaagacgctagtcctgctgatgggcaaagaaggtgtccacggtggtttgatcaacaagaaatgttatgaaatggcctctcacctgcggcgttcccagtactgacctcatctgtcccttcccccaccgctccctttggcttttgcacccccttctttccatacacacacacaccattattttttgggccattaccccatttcccttattgctgccaaaaccacatgggctgggggctggggctggatggacagatacctccccctacccataccccctcctgtgtgtgtttggaaaaaaattgtttttgggtttcatttttgttttactttttttttgttttgttcttttttttttttctgaataaaaaaagattctactaaaaaaaaaaaaaaaaaaaaaaaaaaaaaaaaaaaaaaaaaaaaaa

SEQ ID NO: 654 - DNA, 1279 bp, Homo sapiens
gaattcctggcccttctgctccttctctttccccatagttttaactggcaaccggtagcttcttcagcatccgtacagcctgctacaaaaatgggtactgcagaagatgtttttagaaaagatctgaagatcattcatggctaccccatggtctatgcttttgcactgggttgggaaaaaatcgaagagttccagagcagaccatgtgacattgtaatacccacttaccctaaatcaggtactacttggcttagtgaaattgtggacatggttctaaatgatggaaatgttggaaaatgtaagcgagatgttattacctctaaagttccaatgttggaacaaaatgttcctggagcaagaagatcaggtgttgaactcttgaagaaaactccatcacctcgaattataaagacacatcttccaattgatctactcccaaaatccttctgggataacaagtgcaagatgatttaccttgctagaaatggcaaggatgttgctgtgtcctattatcattttgatctaatgaataatattcagcctcttcctggcacctgggaagaatatctggagaaattcctcgctggaaatgtggcctatggctcatggttcgatcatgttaagagttggtgggaaaagagggaagggcatcccatacttttcttatactatgaagacttgaaaaagaacccgaagaaagaaatcaagaagattgccaactttctagacaagaccttggatgaacataccttggaaaggatcgtccatcacacctcctttgaagtgatgaaggataaccccctggtcaattacacccatctgcccacagaaataatggatcacagcaagtccccattcatgagaaaaggtgttgttggtgactggaaaaattacttcacaatgacccaaagtgagaaatttgatgccatatataagaagaaattgtctggaacaacacttgagttctgcacagatattcagagtgcctaaacttcaacttgaatatatgatttcttgaaatagtagtttgacagggaaatcagatggatttgtgagggagaaataaatgtgcttttaaaacactgattaaatatgccctgcacatccctcagcaggaattattaataattccgaattatctagggccaaggtcttttgtgatcttagttttcaaagggtatgtcttcagattccaaggtgactactgaattaaataaataagttttgtgagttttgaaaaaaaaaaaaaaaaaaaaaaaaaaaaaaaaaaaaaaaaaaa

SEQ ID NO: 655 - DNA, 1789 bp, Homo sapiens
gggggatcttgtgggagcgaaaccaacgcctggctgggagcagccgccgcggaggtctctggccagtatcgcttccacctgtccacaaacatggggaatatctttgcaaacctcttcaagggcctttttggcaaaaaagaaatgcgcattctcatggtgggcctggatgctgcagggaagacaacaattctatacaaactgaagctgggcgaaattgtgaccaccattcccaccattggtttcaacgtggagactgttgaatacaagaatatcagcttcaccgtgtgggatgtgggtggccaggacaagattcggccgctgtggcgccactacttccagaacacccaaggcttgatcttcgtagtggacagcaatgacagagagcgtgtgaacgaggcccgtgaagagcttatgaggatgctagctgaagatgagctccgagatgccgttctcttggtgtttgccaacaagcaggacctccccaatgccatgaatgcggccgaaatcacagacaagctggggctgcactctctacgccacaggaactggtacattcaggctacctgtgccaccagcggagacgggctctatgaaggactagattggctgtctaatcagctccggaaccagaagtgaaccagacccctccttccccctcacttcctcttctccgccctcagctttcctctcatgtggcaaacgtgcgactctgtggtcctgagtgccagaagctgtctccatgggttggtcacagtgtgcatcgcaccgtgctgtacatgtgcagacgcagcctgcagccaggtttttatttaatgtaaatagtttctgtttccactgaggcagtttctggtactcctatgcaatattacttagcttttttattgtaaaaagagaatcaactcactgtcagtactgagaagggatttgggtgtaggggcacctggcctccgggagccattgggctgtagactggtgtcggtatccatttggtggttggtttttaacccaaactcagtgcattttttaaaaatagtttaaaacacaggacaagaacacttgaacacacagaacggagactatgcctagtgtaggttttgcagttaatggcctgaatgctagttatcagatcacctgtttccctgtggggacaggagagaaggtgacgaacaaaccaccatccgctgcatggtcacagtagagcccccgtgactcgcctgtctttgggtcacctgcattccatagcattgtgcttgtacttgtgctcacatggtcacctaggggtaggctgggagccattgtggggtgcagggcctggcttgtacttggtgtgtggccaggcccaatggcagcctacatacccagcttactcttgggcccacttggacgcactggcaggaggcctgggtctcaccagcaggagtgcgtgcaaggtgggagggtcggtccattacagacccacatcctggagcacccccatctccatgtgtgaagtagcttcctccctcagcctgcaagggtccgatttgccatcgaaagacgacctctacttttttcttttgtattttgataaacactgaagaagctggagctgttaaatttatcttggggaaatctcagaactggtttatttggtgtcgtggaacctcttactgctttcaatacacaattagtaatcaactgttttgtatacttgttttcagttttcatttcgacaagcactgtaattatagctattagaataaagtctcttaactattcgaaaaaaaaaaaaaaaaaaaaaaaaaaaaaa

SEQ ID NO: 656 - DNA, 2181 bp, Homo sapiens
ggggacgcgccgggctgccacatcgggcttcgtggctgaaatacagtcagtgtcgcttagcggacgctgtcaggtctctctgcacttccattcctgaaggacccacacaatgctttccaaactagcaagtctgcagactgttgccgctctgcgtcgaggactccgcacctcagtcgcctctgccacatctgttgcaacgaagaagacagagcaaggcccaccatcctctgagtacatttttgaacgggaatctaaatatggtgcacacaattaccatcctttacctgtagccctggagagaggaaaaggcatttatatgtgggatgtggaaggcaggcagtacttcgacttcctgagtgcttatggtgctgtcagccaaggacactgccacccaaagatcatagaagccatgaagagtcaggtggacaagctgacattaacatctcgggctttctataacaatgtccttggtgaatatgaggagtacatcaccaagcttttcaactacaacaaagttcttcctatgaatacaggagtggaggccggagagactgcgtgtaagcttgctcgccgttggggctacaccgtgaaaggcatccagaaatacaaagcaaagatcgtttttgctgttggaaacttttggggtcggacgctgtctgcagtctccagttccacagatccgaccagttatgatggctttggacccttcatgccaggctttgaaaccatcccatataacgatctgcctgcgctagagcgtgctcttcaggatcccaatgttgctgctttcatggtggagcccatccagggtgaagcgggtgttatcgttccagatccaggatacctgacgggagttcgagaactttgcacccggcaccaggtcctgtttattgctgatgaaatacagacaggattggctagaactggtcgatggctagctgtggatcatgagaatgtcagacctgacatagttcttcttgggaaggccctttctggtggcttatatcccgtgtctgcagtgctgtgtgatgatgacataatgctgaccattaaaccaggcgagcacggctccacgtatggcggcaacccactaggctgccgaattgctattgcggctcttgaggttttagaagaagagcatcttgctgaaaacgcagacaagatgggtgccatcttgagaaaggagctcatgaagctgccatctgatgttgtgactgctgtgagagggaaagggttgctaaatgccatcgtcatccgagaaaccaaagattgtgacgcttggaaggtgtgcctgcgactccgagataatgggcttctggccaagccaacccatggtgatatcatccggcttgcccctccacttgtgatcaaagaggatgagatccgggagtcagtggagatcatcaacaagaccatcttgtccttctgagagtaggaactctggggagccatcttcagatggggctcttgtgaaactctgcttgggatgggcagattcggcttgtctgtctcctaaaagacaattttttgaatatgtattatatatttcagttgatgcatagtggagtgacacctaggaacctgcaggtggctgcgtgacacaagagtgagagcgagaggcatctctttgttaaagtttgactgtgtgggagctttctaaggagaaacagatctatctgcatacagcctgcagagtcctgccgtaatttacatgtgtctttacatcttccttgctggcatgaatgttttgtatttggaagtttttttctgagatactacataagaaactgttgaatcattataatcaatgaatggtaagatgattgagggttgagcatatgtaaaatactagtttaaagtacactttgcattggccaacagcagaatgtattatatagtttctgagaattcattaccaaattatactttaagtgcttgattgcaatttgtaaaacatttattttcagtatttctttgaataaagcttcatttttctttataccccaaaagagtattttgtatttatcttttggtaataatcagtgtattatttcacccctatgactggcatttcatcccctattgagatcactgggtgtgtttcaggctttttattctaaataaagctatgaccagttcatatctgtacagaaaaaaaaaaaaaaaaaaaaaaaaaaaaaa

SEQ ID NO: 657 - DNA, 2181 bp, Homo sapiens; identical to SEQ ID NO: 656

SEQ ID NO: 658 - DNA, 1944 bp, Homo sapiens
ggtgaagaaggagcgggccctcgccgctcgttctcgctccctctttctctctctcttcttctctctctctttccctctcgggcaacatggcgggcgtggaagaggcatcgtctttcgggggccacctgaatcgcgacctggatccagacgacagggaagagggaacctccagcacggccgaggaagccgccaagaagaaaagacggaagaagaagaagggcaaaggggctgtgtcagcagggcaacaagaacttgataaagaatcgggaacctcagtggacgaagtagcaaaacagttggagagacaagcactggaggagaaagagaaagatgatgacgatgaagatggagatggtgatggtgatggtgcagctgggaagaagaagaaaaagaagaagaagaagagaggaccaagagttcaaacagaccctccctcagttccaatatgtgacctgtatcctaatggtgtatttcccaaaggacaagagtgtgaatacccacccacccaagatgggcggacagctgcttggagaaccacaagtgaagagaaaaaggcgctagaccaggctagtgaggagatttggaacgacttccgagaagctgccgaagcacaccggcaagttaggaaatacgtcatgagctggatcaagcctgggatgacaatgatagaaatatgtgagaagttggaagactgttcccgaaagctcataaaggagaatgggttaaatgcaggcctggcctttcccactgggtgttctctcaacaactgtgctgcacattacactcccaatgctggtgacacgacagtcttacagtacgacgacatctgtaagatcgactttggaacgcatataagtggtagaataattgattgtgcttttactgttacttttaatcccaaatatgacatattattaaaagctgtaaaagatgccaccaatactggaataaagtgtgcggggattgacgtccgtctctgtgatgtcggcgaggccattcaagaagttatggagtcctatgaagtggaaatagatgggaagacctaccaagtgaaacccatacgtaacttaaatggacattcaattgggccatatagaattcatgctggaaaaacagtgcccattgtgaaaggaggggaagctacaaggatggaggaaggagaggtgtatgccattgagacctttggtagcacagggaagggcgtggttcatgacgatatggaatgttcacactacatgaaaaattttgatgtgggacacgtgccaataaggcttccaagaacaaaacacttgttgaatgtcatcaatgaaaactttggtacccttgccttctgccgaaggtggctggatcgcttgggagaaagtaaatacttaatggctctgaagaacctgtgtgacttgggcattgtagatccatatccaccactctgtgacattaaaggatcatacacagcacagtttgaacataccatactctgcgcccaacctgtaaagaagttgtcagcagaggagatgactattaaaacttagtccaaagccaactcaacgtctttattttctaagctttgttggaacacattataccacaagtaatttgcaacatgtctgttttaacagtggacctgtgtaatgccgttatccatgtttaaaggagtttgatcaaagccaaactgtctacatgtaattaaccaaggaaaaggctttcaagactttactgttaactgtttctcccgtctaggaaatgctgtactgctcactagttaggaattacttaaacgttttgttttgaagacctaagagatgctttttggatatttatattgccatattcttacttggatgctttgaatgactacatacatccagttctgcacctatgccctctggtattgctttttaaccttcctggaatccattttctaaaaaataaagacattttcagatc

SEQ ID NO: 659 - DNA, 1944 bp, Homo sapiens; identical to SEQ ID NO: 658

SEQ ID NO: 660 - DNA, 2183 bp, Homo sapiens
gttcgcaaaatcagccatcgactcgcacaaagcagcgcactccgggacagccgagaacactacccggcagcagcgcggcgacactccgtgcatcgtatgcccctgcgcccctgccgcggcagccggagcgccccgagagaacgctccaccgcggggtccaggtgcagttagcgtgcctagcccgcatcgcgcggtcgcgggagagcgggaagcggcaagcagggagcgggacggcggcgaggcgctcgcgggcccctcctgctgcccgcgcccggcgagctcatggcggccatccgcaagaagctggtggtggtgggcgacggcgcgtgcggcaagacgtgcctgctgatcgtgttcagtaaggacgagttccccgaagtgtacgtgcccaccgtgttcgagaactatgtggcggacatcgaggtggacggcaagcaggtggagctggcgctgtgggacacggcgggccaggaggactacgatcgtttacggccgctctcctacccggacaccgacgtcatccttatgtgcttctcggtagacagcccggactctctcgagaacatccccgagaagtgggtgcccgaggtaaagcacttctgccccaatgtgcccatcatcttggtggccaacaaaaaagacctgcgcagcgatgagcatgtccgcacggagctggcccgcatgaagcaggagccagtgcgcacggatgacggccgcgccatggcggtgcgcatccaagcctatgactacctcgagtgctcggccaagaccaaggagggcgtgcgcgaggttttcgagacggccacgcgcgccgcgctgcagaagcgctacggatcccagaatggctgcatcaactgctgcaaggtgctatgaaggccgcgccctgcctcacgcccttgccagcgtggctccccctccttggcccggtcgcccactaaccgggagaaagggagacccgtgcccccgaggacaccaccagactgcctgacatctgctggtggctctggctggtcacgctgaatattagcgtgggcaccgagctccccccttcccagtgtctgtgtgtgtccagctgtgtggcacaggcctgggcgccctgctgagtgccaaggggttcctgagcgtccttttctaaagagccaggcctcgaagtgtggttgtgtgtgtgtacgactccctacacccctaccccactcctgccccacccccgcctctggtttccccaggggcatgcagagtggttgagccccagcagatgtacgcttgtaaccagcaagccactactgttgctccatgtctgtaacatagaccccctggaatcacgggaggggagggctggggaggatggggatgttacataaatacagattttattttcggaggcagaatggtattgtttagtggtgagtggtgtgaccagggcccatgagcaactcttcccaggctgggtcaggagcccacccatccaagcatgaactggactcggccatctttccacaccctggggaagacatttgcaactgacttgaggttgagaggaagcagctcccagacacagtgtctcctgggccaagccccagcgaacctcctttccagccacctgcagaggatccagggtgtgctgtggggtcacttttgccataagcgaactttgtgcctgtcctacaagtgaacattgttcagtccgagagactattgttgctgaatttatttaaaggctgaagctttttttgttgttgatgaaagaattctttgcacaattgtcccattgtttgacacccagtgcacttgtcatttgcataaggcagcattttgaccacacttgtatgctgtaacctcatctacttctgatgtttttttttttaaacaaactatgatgactttaaggagattacaaaaaagattctaatttttgctttgttttcttgaaaaaaatgtcaaccatgtgactttttaaaaatttgtgtagcatacacacagttttggtaaaggaaggcaacacgtattggggtctatttaaacctccctccctctccccacaagacaagtctcttcatctatgtgaaattttctgtacattctctgtgcagagcaaagcttcttcttccttattcccctccttcccagcccagtggtacttctactaaattgtctattgtcttgttttgtttttgttttatttt

SEQ ID NO: 661 - DNA, 1581 bp, Homo sapiens
cacagctgtgcccacatcccgccccgcgcggaccgcttgtagccgcttctcgggccggaggatgcccaggaagctgctgctactgccccagctgtccgcgtgctccgctctgcgcgtccgcgggcccggcccgccgcctcgccggccatgaacgccgcccgcactggctaccgagtcttttcggccaactccacggccgcctgcacggagctggccaagcgcatcactgagcgtcttggtgctgaattggggaaatctgttgtttatcaggagaccaatggagaaaccagagttgaaatcaaagagtctgttcgtggccaagatattttcattatacaaaccatacccagagatgtgaatacggccgtgatggagctgctgatcatggcgtacgccctgaagactgcctgtgccaggaatatcatcggtgtcatcccctacttcccctacagcaaacaaagcaagatgaggaagaggggctccattgtgtgcaagctcctggcatccatgctggcaaaagctggtctaactcacattatcactatggatcttcaccaaaaggaaatacaaggctttttctgcttccccgtggacaaccttagagcctcacctttcctgctccagtatatccaggaagaaattccaaattacagaaatgcagtcattgtagctaagtctcctgatgctgcaaaaagggctcagtcctatgcagagagactacgcctgggcctggctgtgatccacggagaagctcagtgcacagagctagacatggatgacggtcgacactcaccccccatggtcaagaacgccactgtgcaccccggcctggagctacccttgatgatggccaaagagaagccaccaataacagtggtcggagacgtcgggggacgcattgcaatcatagtggatgacatcattgatgatgtggagagctttgttgctgctgcagagaccctgaaagagagaggtgcttacaagatctatgtcatggccacgcacggcatcctgtctgctgaagctccccgtctgatcgaggagtcccccattgatgaggtggtggtgacgaacactgtccctcacgagcttcagaaactacagtgtcccaagataaagactgtggacatcagcttgattctttctgaggcgattcggagaatccataatggcgaatccatggcttacctcttccggaacatcacagtggatgattagctccgagctgccttgacctgcaggggagcacacagcagtgtcagccggcagacaggctgccgagtcccttctcccccatcagcagaatgcagcctatttgggaatacgtcctgcggaagaggcaggctctgtcacagcaggcatccagttgtagactgagtccccacgctggtttgttcactagtgtctgctctggggaaggcaggtgaggcgttgagcttggtcagggagctgagtggccctggcactgatgcgtgcagttgtaccattggacatgaagggtccccggctgctttcacggagctcgtcagatgagagcggagcagcctgtccctcagaactgtgttgctgcaaataaaagtt

SEQ ID NO: 662 - DNA, 2098 bp, Homo sapiens
gaattcgggaatgtcatggatccagtgagacagatccagtgcgaccgtgaaggcaaacgctttccgttcctctcagctccaccagcttccacgtcctcgcccgaccgcgccatggagggttaccataagccagatcagcagaagctccaggccctgaaggacacagccaatcgcctgcgcatcagctccatccaggccaccaccgcggcaggctcgggacaccccacatcatgctgcagcgctgccgagatcatggctgtcctgtttttccataccatgcgctacaaggccctggatccccgaaaccctcacaatgatcgctttgtgctctccaagggccatgcagctcccatcttatatgcagtctgggctgaagctggcttcctgcctgaggcagagctgctgaacctgaggaaaatcagctctgacttggatgggcatcctgtcccgaaacaagccttcaccgatgtggccactggctccctgggccaggggctgggagctgcgtgcgggatggcatacacaggcaaatacttcgacaaagccagctaccgagtctattgcatgctgggagacggggaggtgtccgagggctccgtttgggaggccatggccttcgctggaatttacaagctggacaacctcgttgccatttttgacatcaaccgtctgggccagagcgacccagccccgctgcagcaccaagtggacgtctaccagaagcgctgtgaggcctttggctggcacgccatcatcgtggatgggcacagtgtggaggagctgtgcaaggcctttggtcaggccaagcaccaaccaacagccatcattgccaagaccttcaagggccgcgggatcacagggattgaagacaaggaggcgtggcatgggaagcccctccccaaaaacatggctgagcagattatccaggagatttacagccaggttcagagcaaaaagaagatcctcgccacgccccctcaggaggatgccccttccgtggacattgccaacatccgaatgcctaccccacccaactacaaagtgggggacaagatagccacacggaaagcctatggattggcccttgccaagctgggccacgccagtgaccgcatcatcgccctggatggagacaccaaaaattccaccttctcagagctcttcaaaaaggagcacccagaccgtttcatcgagtgctacattgctgagcagaacatggtgagcattgctgtgggctgtgccacacgtgacaggacagtgcccttctgcagcacttttgcggccttcttcacacgcgccttcgaccagatccgcatggccgccatctccgagagcaacatcaacctttgtggctcccactgcggcgtgtccattggggaagacgggccctcgcagatggccctggaagacctggccatgtttcggtcggtccctatgtccaccgtcttttacccaagtgatggagttgccacagagaaggcagtggaattagcagccaatacaaagggcatctgcttcattcggaccagccgcccagaaaatgccattatctatagcaacaacgaggatttccaggttggccaagccaaggtggtcctgaagagcaaggacgaccaagtgacagtgatcggggctggcgtaactctgcacgaggctctggctgctgcagagatgttgaagaaagagaagatcggtgtccgtgtactggaccccttcaccatcaagcccctggacaaaaagctcattctcgactgtgccagagcaaccaaaggcaggatcctcaccgtggaggaccactactatgaaggtggcataggcgaggcagtatctgctgtggtagtgggcgaacctggagtcacagtcactcgcctggcggtcagccaagtaccacgaagtgggaagccagctgagctgctgaagatgtttggtattgacaaagacgccattgtgcaagctgtgaagggccttgtcaccaagggctaggaaggacatgggatgccgggtgggtgaactacacattccagggatgttctggcaaaggtgctcaagggtgtaccgagtggaaaggtaaatatatgttttgagaaaaaccgaattc

SEQ ID NO: 663 - DNA, 2098 bp, Homo sapiens; identical to SEQ ID NO: 662

SEQ ID NO: 664 - DNA, 1097 bp, Homo sapiens
agctccagagatggctaccgcgatgacagtttccagcaaactcctcggcctgctgatgcagcagctgagaggtacccgccagctgtacttcaacgtcagccttcgatctctgagctcctctgcacaagaggcgtccaaaagaatccctgaggaagtctcagaccacaactacgagtctattcaagtaacatctgcccagaagcatgttctgcatgtacaactaaaccggccggagaagaggaatgccatgaacagggctttctggagggagttggtggaatgcttccaaaagatatctaaagactccgactgtcgggctgttgtggtctctggtgcaggaaagatgttcacttcaggtattgacctcatggacatggcatcagacatcctgcagcccccaggagacgatgtggcccgcatagcctggtacctccgagacctcatcagccgataccaaaagactttcactgtcattgagaagtgccccaagccggtgatcaccgcaattcacggaggctgcattggtggaggcgtggatcttatttctgcctgtgacattcgctactgcactcaggatgctttcttccaagtcaaggaggtggatgtgggcctggctgctgatgtaggaacgctgcagcgactgcccaaggtcattgggaaccggagcctggtcaacgagctgaccttcaccgcccgcaagatgatggctgacgaggccctggacagtgggctggtcagccgcgtgttcccagataaggacgtcatgctgaatgcagcctttgccctggcggccgatatttccagcaagagtcctgtggctgtgcaggggtcaaaaatcaatttaatctactcccgagaccattctgtggacgagagccttgactatatggccacttggaacatgagcatgctgcagacccaggacatcatcaagtcagtccaggcagccatggagaagaaggactcaaaaagcatcaccttctccaagctctgagtgccttcctgaccctggtcccctcagtgcctcctcccggtgtataactttatgacttagttcttcagttcccggggccttatctccactgtgaacaataaag

SEQ ID NO: 665 - DNA, 2748 bp, Homo sapiens
ccggaagcccgaagcaccggagtcccgcagaacctgactccggcctgtcaccaccaccaaaggctaggggacgtcgcctcggtcactatggggctcctgctcaagcctggagcgcgccagggcagcggcacctcctcggtcccagacagacgttgtccccgctccgtcttcagcaacattaaggtatttgttctttgccatggcctgctacagctctgccagctgctctacagcgcctacttcaagagcagtctcaccacaatcgagaagcgctttgggctctccagctcttcctctggtctcatctccagtttgaatgagatcagcaacgctaccctcatcatcttcattagctacttcggcagccgggtcaaccgcccacggatgattggcatagggggtctcctcctggctgcaggggcctttgtcctcaccctcccacacttcctgtcagagccctatcaatacacctcgaccacggatggaaacaggagcagctttcagactgacctctgtcagaagcatttcggagccctgccccccagtaagtgccatagcaccgtgccagatacccacaaggagaccagcagcctgtggggcctgatggtggttgctcaactactggccggcattgggacagtgcccatccagccctttgggatctcctacgtggatgactttgccgagcctaccaactcacctctgtatatctccatcctattcgccatcgctgtgttcggaccggctttcgggtacctgctgggctcagtcatgctgagaatcttcgtggactacggcagagtggacactgctaccgtaaacctgagcccaggtgaccctcggtggattggagcctggtggctgggcctgctcatctcctcaggcttcttgattgtcacctctttgcccttctttttctttccccgagcaatgtccagaggagcagagaggtctgttaccgcagaggaaacaatgcagacggaggaggacaagtcaagaggctccctgatggatttcattaaacggttcccccgcatcttcctgaggctgctgatgaacccgctcttcatgctggtggtcctgagccagtgtaccttctcctcagtcatcgctggcctctccacgttcctcaacaagttcctggagaagcagtatggagccacggcagcctatgccaacttcctcatcggtgctgtaaatcttccggctgcagccttggggatgctgtttggaggaatcctcatgaagcgttttgttttccctctgcaaactatcccccgagtggctgccaccatcatcaccatctccatgatcctctgtgtacctctcttctttatgggatgctccacatcagccgtggctgaggtctaccctcccagcacatcaagttctatacatccgcagcagcctcctgcctgccgcagggactgctcgtgcccagattccttcttccacccagtctgtggagacaatggagtcgagtacgtttccccttgccacgccggctgcagcagcaccaacacaagctcagaagcttctaaggaaccgatctacttgaactgcagctgtgtgagtggaggatcggcgtcacaagacaggctcatgccccacgtcctgcgcgcactactgctcccgtccatcttcctcatttcctttgcggcgctcattgcctgcatctcccacaacccgctctacatgatggtccttcgcgtggtgaaccaggatgaaaagtcgtttgccattggggtacagttcttgttgatgcgcttgctggcctggctgccggctccatccctttatggcctcctcatcgactcctcctgtgtccggtggaactacctatgctcagggagacgaggggcctgtgcgtattatgacaacgatgctctccgaaacaggtacctgggcctacagatggtctacaaggccttgggcacactgctgctcttcttcatcagctggaggatgaagaagaacagggaatacagcctgcaggagaacacctcaggcctcatctgaccctcagctgggactactgccccaccccagagactggatcctatcccttccacacctacctgtattaactaatgtcaacatgccttcctcctcctcttcctcctcctcctcctccttcttcttcctctctctctctctctctctctctctctctctctctcacacacacacacacacacacacatgagagagagttcactcaccctttgagatcacctgccttttctcttctgcctaaagtcttaaggcctgaagtacactgagctgaatgagcaccgggcctgagagtttagtttctccaagtccttggaaggtatccccagcgtaggccctacgtcctccagacaagatgcccataatgaggcggcctctgttttcaccagtgtctcaggaatacttaatggagtgaaaagagggagtcttgccttcttgggccaggcagcccggatctcctctgcctctgcccacacccaggagagccagaggagaagcaggtagttggtttcttatctgctccagcggggctaagggagctgggtgtgtccacttttcatctggattccgtctagcatgaaagccgtgccctcgaggctgttttggaaaccaccattttgggaagtatccctctctataaactatgccccggtatctgaggaggaatgaagggaggaacaaggctggatcatggaaaactgttcacaggaaccagaggcctatcctcccgtcggg

SEQ ID NO: 666 - DNA, 2748 bp, Homo sapiens; identical to SEQ ID NO: 665

SEQ ID NO: 667 - DNA, 811 bp, Homo sapiens
gccttttctctgccttgcttgcttgagctccagcacagtccgagatggctggcggtaaggctggaaaggactccggaaaggccaagacaaaggcggtttcccgctcccagcgagcgggcttgcagttccctgtgggccgtattcatcgacacctgaaatctaggacaacaagccacggacgtgtgggcgcgaccgcagctgtgtacagcgcagccatcctggagtacctcaccgcagaggtacttgagttggcaggaaatgcatcaaaagacttgaaggtaaagcgtattacccctcgtcacttgcaacttgctatccgcggagatgaagagttggactctctgatcaaggctacgattgctggtggtggtgtcatcccacacatccacaaatcactgattgggaagaaaggacaacagaagactgtctaaggatgcctggattccttgttatctcaggactctaaatactcttaacagctgtccagtgttggtgattccagtggactgtatctctgtgaaaaacacaattttgcctttttgtaattctatttgagcaagttggaagtttaattagctttccaaccaaccaaatttctgcattcgagtcttaaccatatttaagtgttactgtggcttcaaagaagctattgaatctgaagtggtgggttttgattgagttgactgtttttaaaaaactgtttggattttaattgtgatgcagaagttatagtaacaaacatttggttttgtacagacattatttccactctggtggataagctcaataaaggtcagatcccaaactaaaa

SEQ ID NO: 668 - DNA, 466 bp, Homo sapiens
ctttccgtctccggccgccgcaggagaggagtcgccgccatgtccgcgcatctgcaatggatggtcgttcggaactgctccagtttcttgatcaagaggaataagcagacgtacagcacggagcccaataatctgaaggcccgaaactccttccgctacaacgggctaattcaccgcaagacggtcggagtggaggcctggcctgatggcaaaggggtcgtggtggttatgaaacgcagatccggtcagcgaaaacctgccacttcctacgtgaggaccaccatcaacaagaatgctcgggctaccctcagcagcatcaggcacatgatccgaaagaacaagtaccgccctgatctgcgtatggcggccatccgcagagccagtgccatccttcgaagccagaagcctgtggtggtgaagaggaaacggacccgccccaccaagagctcctgagccccacaccccg

SEQ ID NO: 669 - DNA, 1037 bp, Homo sapiens
ggcgggggagagttccaggttgaagagactcttccttgcccctgaatctttgctgtttcaaaaccttggaataccatttttggatttgggctgcagaccgtggcacacatgtgagatccttcggaacacagtgtctccggtcatcctcaacccctaagccatccgacactggtgaggaccatgtccctgttcacatccttccttctgctctgcgtgctcacggcagtctatgccgagaccttaaccgaaggggctcaaagtagctgccctgtgattgcctgcagttctccggcctggaacggcttcccaggcaaagatggacacgacggtgccaagggagaaaagggagaaccgggtcaaggcctcagaggcttgcagggccctcctggaaaagtaggacctgcagggcccccagggaatcctgggtcaaaaggagcaacgggaccaaaaggagaccgtggagagagtgtagaatttgatactaccaacattgatttagaaattgcagccctgcgatcggagctgagagctatgagaaagtgggtgctcctttctatgagtgaaaatgttggaaagaagtacttcatgagcagtgttagaaggatgccccttaacagagcgaaggctctgtgctccgaactccagggcactgtggccactcccaggaatgctgaggaaaatagggccatccagaatgtggccaaagatgttgccttcttgggcataacggaccagaggactgaaaacgtttttgaggacctgacaggaaacagagtgcgctacactaactggaatgagggtgagcccaacaatgtgggctctggggaaaactgtgtggtgctcttgacaaatgggaagtggaatgacgttccttgctctgattcctttttggtagtttgtgaattctctgactgagggtgcttgtttctcatccctccttgatacttcagtgtattctataagtccacagtttgttctgaaaatataggcaattcaacattggttaccaattaaactgtaacatttttcagaatagc

SEQ ID NO: 670 - DNA, 2270 bp, Homo sapiens
gtcggatccccgacactgtcgggctcccgcccagctcccgcatcaggccgtcgccggcctcatgaggaacccccggctcgggcggagaaccgggcagtgcccggaccgcgatcctgccgcggtcttagaacgttagacaggatgcggctggaccgccgggccctctatgcgctagttctgctgcttgcctgcgcctcgctgggtctcctgtacgccagcacccgagacgcgccaggtctcccgaaccctctggcattgtggtcacccccacaaggtcccccgaggctcgatctgctagaccttgccactgagcctcgctacgcacacatcccagtcaggatcaaggagcaagtggtggggctgctggctcagaacaattgcagttgtgagtccagcggaggacgctttgccttgccgttcctgaggcaggtccgggcgattgacttcactaaagcctttgacgccgaggagctgagggctgtttctatctccagagagcaggaataccaggccttccttgcaaggagccggtccctggctgaccagctgctgatagcccctgccaactcccccttacagtatcccctgcagggtgtggaggttcagcccctcaggagcatcctggtgccagggctaagtctgcaggaagcttctgttcaggaaatatatcaggtgaacctgattgcttcccttggcacctgggatgtggcaggggaagtaacaggggtgactctcactggagaggggcagtcggacctcacccttgccagcccaattctggataaactcaaccgacagctgcaactggtgacttacagcagccggagctaccaagccaacacagcagacacagtccggttctccaccaagggacatgaagtggccttcaccatcctcataagacatcctcccaacccccggctgtacccaccatcatccctaccccaaggagcccagtacaacatcagtgctctggttaccgttgccaccaagacctttcttcgttatgatcggctacgggcactcattgccagcatcagacgcttttaccctacggtcaccatagtaatcgctgacgacagcgacaaaccggagcgaattagcgacccccatgtggagcactatttcatgcccttcggcaagggttggtttgcaggtcggaacctggcggtgtcccaagtaaccaccaaatacgtgctgtgggtggacgacgactttgtcttcacggcgcgcacgcggctggagaagcttgtggatgtcctggagaggacgcccctggacttggttgggggcgcggtgcgggagatctcgggctacgctaccacctaccgacagctgctaagtgtggagccgggcgccccaggctttgggaactgcctccggcaaaagcagggcttccaccacgagctcgctggctttccaaactgcgtggtcaccgacggcgtagtcaacttcttcctggcgcgcacagataaagtgcgccaggtgggctttgacccacgcctcaaccgggtggctcatctggaattcttcctggatggtcttggttcccttcgagttggctcctgctctgatgttgttgtggatcatgcgtcaaaggtgaagctgccttggacatcaaaggatccaggggctgaactttatgcccgttaccgttacccgggatcactggaccaaagtcaggtggccaaacatcgactgctcttcttcaaacaccggctacagtgcatgaccgccgagtaacgtctgatttgggccttcacactgtcaggctgggcctgcctcctccctgccaggaatttccagcaaccacccccccccaatccctgagcaccccactgatgaacaccctggcttcccgaccctctccaccaatctgattcctaacaggggcttgtcctggtgacacccttcctttctgtgagtgaccagaggccagatggagccatatcctcccccacagccagtgccaagtcctccccaaccccactcctatggggcaggaaatggggaggttcactttccaagtgccaaagagcccagacggactctaagaccctcaagtggaaacactctcacctcctgaggtgggcagggaaactcccaatttgcaaccccagggacatgcaccccaccccagctctggatccagcaccatgtgtcccggctccaacatacccctacagaaagcactgtgactgtagttctgtggggctggtgaacacacggtggaagccaaaaaaaaaaaaaaaaaaaaaaaaaaaaaaaaa

SEQ ID NO: 671 - DNA, 1768 bp, Homo sapiens
ctgcgggttgaggagacacacaagggaagtgatcgtcgcgggaaccagatcgtctgacccaggacccccgcgcgccatgccgtccgagaagaccttcaaacagcgccggagcttcgaacaaagagtggaagatgtccggctcatccgggagcagcaccccaccaagatcccagtgattatagagcgatacaagggtgagaagcagctgcccgtcctggacaagaccaagttccttgtacctgatcacgtgaatatgagcgaactcatcaagataattagaaggcgcctgcagctcaatgctaaccaagccttcttcctcctggtgaatgggcacagcatggtgagtgtgtccacacccatctctgaagtgtacgagagcgagagagatgaagacggcttcctgtacatggtctatgcctcccaggagacgttcgggacagcactggctgtgtaagactagaacaatacctaatgtttgttaagcccctaccaaggcaaaaagggacgttaccagcggaagctggtcagctcaccaccccacagatcagaacgtaggcacccacgtaggggattagaaactatctcagccagaaactgagtgccatgcaagtgcatttggcttggaaactcatctaaactagactatcctgtgttcaaactttagtttaaaaataaaatactttgcatcctaagttgccaataaaaagaccaagttattttgacattttctccctagtagggacttgaaatagaagagcagtgtcaggggcggcctcttcctgggacctgctgccttctctaaaagggcttctactcagagaagtccctggaaacagtccctcgcccaggttgcctagcagaggtctccagagggctctggctttgcccgaaacaggtcaggtgtataggacatagctctaaggacccacatgggccctggtcctgaaccccagccatttcacctcagcagtgtgggacgctcacccgctgctgtgtagacattaccacatgcaccactgctcagaggccagttccaaccctgtccaggggttgcttggtccagcttcttaagaaactgcaaggtgtttttctcctggtttggacttctctggtccatgcctgcttcaggtgtgcaatgctggccttcccgtgcagctgtccagtggaaggctgaagtccaagtgcactcgccttgtacgtggttcacacctacttgtcagtgcacacccacagtctttgtaagggcggttctgacagctgttggggtttccccatttcatgccagtacatacatgtcagctctgaaggcaacagcaacaggaagagagccatgcttgtgacagacatacagccacttccaactaaagcaagcctctgcttcctgctacctgcatggagcccactgtgacactcagaccatccccggtcactcactcgtgtctgagaatctcagtgagagctgcctctgtcacggacggaagccaacacagccacctctcgacctggctccccacagcacccaccctccctgcatgcagctgtccctgctaacccccaatgttatgttacactgtgtaaatccccactgctgccgtgtgtgggttgtgtacgtcgtcatgtccctggtttataactatggtgcggtcgggaaggattcctgtaatgctgctctaagatgctgctcaggcagccattgtaggacacctgtactctgatgcactaagtcaataaaggcacaactggaaaaaaaaaaaaaaaaaaaaaaaaa

SEQ ID NO: 672 - DNA, 3609 bp, Homo sapiens
gttcttcagtcgtaccgcgtgcgcaacggtagtgacgcgtttaacccggagtatggcggataccggcttgcgccgcgtggttcccagcgacctttatccccttgtgctcggctttctgcgagataaccagctctcagaggtggccagtaaatttgcaaaagcgacaggcgctacacagcaggacgccaatgcctcttccctcttggacatttatagcttttggctcaagtccaccaaagccccgaaggtgaaactgcagtcaaatggaccagtggccaaaaaggctaagaaagagacttcatccagtgacagcagtgaggacagcagtgaggaagaggacaaagcccaagttcccacacagaaggctgccgcccctgccaagcgagccagtttgcctcagcatgctgggaaagcagcagccaaagcttcagagagcagcagtagtgaagagtccagtgaggaagaggaggagaaggacaaaaagaaaaagcctgtccagcagaaagcagttaagccccaagccaaggcagtcagacctcctccgaagaaggcagagagctctgagtccgagtctgactcaagctcagaggatgaagcaccacagacccagaagccaaaggcagctgctacggcagctaaagccccgactaaagcccagactaaagccccagccaaaccaggtccaccagcgaaagcacagcctaaagcagccaatggcaaagcaggcagcagcagcagcagtagcagcagcagtagcagtgatgactcagaggaagagaagaaggcagctgcacctctcaagaagactgcacctaaaaagcaagtcgtggccaaggcaccagtaaaagtaactgctgcccccacccaaaagagttctagcagtgaggactcttccagtgaagaggaagaggaacagaaaaaacccatgaagaaaaaagcaggtccctacagttcagttccaccaccttctgtttctttatccaaaaagtccgtgggagcccagtctccaaagaaagcggccgcgcaaacacagcctgcagacagcagtgcagacagcagcgaggagtctgattcaagttctgaggaagagaagaaaactccagctaagacagtcgtctccaagacacccgccaaaccagctccagtgaagaaaaaggccgagagctcttcagacagctcagattctgacagttctgaggatgaagctcctgccaagccagtcagtgccaccaagagtcccttaagcaagccagctgtcactcctaagccgcctgctgcaaaggcagtggcaactcctaagcagcctgcgggcagtggccagaaacctcagagcagaaaggctgacagcagctccagcgaggaggagagcagctccagtgaggaagaggccaccaagaaaagtgtgacaacccctaaggccagggtgaccgccaaagcagcaccctctctacctgccaaacaggctcctcgggctggtggagacagcagctccgactcagagagttccagcagtgaggaggagaagaagacgccgcctaaaccccccgctaagaagaaggcagcaggtgcagccgttcccaaacccacccctgtgaagaaagcagcagccgagagcagcagcagcagcagctcctccgaagattccagtgaagaagagaaaaagaagcccaagagcaaagctactcccaaaccacaggcaggaaaggccaatggcgttccagcttctcagaacggaaaagcaggcaaggaaagtgaggaggaagaggaagacacagaacagaacaaaaaggcagccgggaccaagccaggttcaggcaagaaacggaagcacaatgagacagcagatgaagcagcaactcctcaatctaagaaagttaagctgcagacccctaatacgtttccaaaaaggaagaagggagagaaaagggcatcttcccctttccgaagggtcagggaggaggagattgaggtggactctcgagtagcagacaattccttcgatgccaagcgaggtgcagctggagactggggtgagcgagccaatcaggttctgaagttcaccaaaggaaagtccttccggcacgaaaaaacaaagaagaagcgaggcagctaccggggaggctccatctctgtccaggtcaattccgtcaagtttgacagcgagtgacctgtgtcatctttagcaaaggaagggtgactttgggaggctggcactcacctccaatggacccagaaactcagtgttattaggagagagttgtggcacggacagtttgaagcaggttctttgacactgcagtctatagtccttccatgctcctgcttctggacaggtttgtttttgagcgttgattgtcaaagacaaaaagtttttttgtttgttttgttttattttttaagaaatccatttggttgtcagctgccttcctgttctgttggtcttcatactgagaaattgtatattttatattaaatcatgtcatacagatttttgttgtgattttcagagatgagttccacagattaaagtctttgcctaaggcaatgcacagagtcacatggaggattctgtttatgtgagtgcgcagacccacatttgatcccacccctcaaagccccggtgggccctgacataagtcttgtgatgtttgactgctaagcatgccctgtgctcatcttcatccattgggcctgacaccgaagcttcccgaagccggcgtggatctgccaactttggggataaaattgcagttcttggtacaatttcctactgaactgacaggcaggattctcgatgtgagtgcgatgcaacggtttttgttttgttctcagtagctattagtgctacgtgtttacagtgtgttctagttttaatttcgaagtaagcttttctgacactgagaggcatttgcaacaacttgactcttaccgctgttgtatataagctcatgaatatatttgattcttgttaacatcatcaagagcagaatggtaaactcctgcatggttgaggcactggtcaaggaagtggagatgacctacctgagcctctgggtgaagtaggtacggtggatagatcctgggcacctgcagtgaggagcaggcgaaggacagtgaggctgggagaggtctgggcaggaccgttctgtctggatccctcccctcaaagggatcacatgggagtggttatgtcttatttaagttggtcccctggattgattattggtaccttaactatatgatgttactgatacaggctaaccagggggggctgggaggcatatctgggtgatagtggcgcttacctaccattcaaggacagagtgtgatctccatcaaggcaggaagtgaatgagcagagatccctgggccaagggagtaaattataaagccgtaagatttgaccattggcagagctcagccagagtgagggaagggagaagagcaccctggctaacctggtgagaacagacacggagcctccctggtttggtttccatggtcacctggtaacctgctaaaagtgggtgcctgtggcagctccttgaggaagtctgcatggtcaaagttctgtgtcttactacaaaacaataaaatggatggtccctg

SEQ ID NO: 673 - DNA, 1740 bp, Homo sapiens
cttaggaagtccccacagttgcctggggaagtcaatacaattatatgagtttccctcatatcatccagctgtctgaggagagaagacttgaggaaaaacccatggccaagcgtacccagagttgggcttgggtatcaagggtatagacaagagccagcaggtcagtggaactcaagatgcagcctgcctcctcagctggaaatgattgaggacctcctgcaaaggagaaaacaaatcatcagaaggctggaattgtgtaacacgaaaatctcttctggaccgaggcccatctctggtttggcaacacaaccaaagcagcatctcttttctcatctcctgggaaaaaaaaaaaaaaaagaaaggcaacagagaaaaagtagccagagaccagagaataaagtgaaggcagggaaccgagcaagcagaccttggtggaaagtgtacctctggcagaaaccccaagatgccttctgagaaggacggtgccaagaagagcctcatgcagaggctggccctgaagagccggatagcgaaggagacactctccgagttcctgggcacctttataatgattgtccttggatgtagctctattgcccaagcggtcctcagtcgagaacgttttggcgggatcatcactatcaatattggatttgcatcggcagtcgtgatggctctctatgtgacatttggtatctctgggggccacatcaacccagctgtgtcttttgcaatgtgcgcctttggaaggatggagtggttcaagttcccattttatgtgggagcccagtttttgggagcctttgttggggctgcaacggtctttggcatttattatgatggactcatggcctttgctggcggaaaactgctcgtcgtaggagaaaatgcaacagcattcatttttgcaacatatccagctccattcatatccacgccaggtgcctttgtagaccaagtggtgtctaccatgttcctccttctgatcgtctttgccatgtttgactccagaaacctgggtgtccccagaggcctggagcctgttgtcattggcctcctgatcattgtcctttcctgttctctcggactcaactctggctgtgccatgaacccagctcgagacctcagtcccaggctcttcactgcactggcaggatgggggtttgaggtcttcacagttggaaataacttctggtggatacctgtcgtgggtcctatgattggtgctttcctgggaggtcttatctacattctttttatccaaatgcatcactcgaagctcgacccagacatgaaggcagagccatctgagaacaacctagagaaacacgagctcagtgtcatcatgtagtgggatggccagatctgcagttaccgttcatccagttctttcttcagagaagatgtcacctgtgtgcctatgcagacttggggcgggggaatctacctgtctgctagttttctctagccaactgggacaaaaaaattacaaaggcatccgtggaaaactccaccagtcacccctccccagaatagcactgactgtttatgatgggtatttgatggaagtccttactcctaggtgattgctaagaattttgaaacttgaccatgtgcttggctggatagcctcagagacctttttttaccctgtatgaaattgtgtcatcaaaggctctgtcttcacaatctataaatacaacattctaaaactgaaaaaaaaaaaaaaaaaaaaaaaaa

SEQ ID NO: 674 - DNA, 711 bp, Homo sapiens
gggactcgcacttgcaatatgactttggaggaattctcggccgcagagcagaagatcgaaaggatggacacggtgggcgatgccctggaggaagtgctcagcaaggctcggagtcagcgcaccataactgtcggcgtgtacgaggcagccaagctgctcaacgtagacccggacaacgtggtcctgtgcctgctggctgcggatgaagatgacgaccgggacgtggctctgcagatccatttcaccctcattcgtgctttctgttgcgagaacgacatcaacatcctgcgggtcagcaacccgggtcggctggcagagctgttgctactggagaacgacaagagccccgctgagagcgggggcctggcgcagaccccggacttacactgtgtgctggtgacgaacccacattcatcacaatggaaggatcctgccttaagtcaacttatttgtttttgccgggaaagtcgctacatggatcagtgggtgccagtgattaatctccccgaacggtgattccccgaacggtgatggcatctgaatggaaataactgaaccaaattgcactgaagttttgaaatacctttgtagttactcaagcagtcactccccacgctgatgcaaggattacagaaactgatgtcaaggggctgagttcaactacaggagggctaggagatgactttgcagatggacagagaggtgaaaata

SEQ ID NO: 675 - DNA, 711 bp, Homo sapiens; identical to SEQ ID NO: 674

SEQ ID NO: 676 - DNA, 711 bp, Homo sapiens; identical to SEQ ID NO: 674

SEQ ID NO: 677 - DNA, 628 bp, Homo sapiens
tgaattcctggaacctcaactggctcccactgctctctcggtgcagttaccgtttggcgatccctctcctgctaacatgccgttcgttgagttggaaacaaacttgccggctagccgcatacccgcagggctggagaaccggttgtgtgcggccacagccaccatcctggacaaacccgaagaccgcgtgagcgtgacgatacgaccgggcatgaccttgttgatgaacaaatccacagagccctgcgcccacctcctgatctcttccatcggtgttgtgggcaccgcggagcagaaccgcagccacagctccagcttcttcaagttcctcaccgaggagctgtccctggaccaggacaggatcattatccgattcttccccttggagccctggcagatcggaaagaaaggaactgttatgacgtttctgtgatggagacaaggaacgcagggcgtttgcttgagcctgtccagagcccttccagagaggcctcctggcagatacgataccagatccctcttttgcataagtgtctgtgatctcactgacctgttttcctctcccccagcctcgtgaacgagagagcaataaagaagagagcataatcccaaaaaaaaaaaaaaaaaa

SEQ ID NO: 678 - DNA, 628 bp, Homo sapiens; identical to SEQ ID NO: 677

SEQ ID NO: 679 - DNA, 2472 bp, Homo sapiens
ggtttgtgcgagccgagttctctcgggtggcggtcggctgcaggagatcatggtgctgagcgaagtgtggaccacgctgtctggggtctccggggtttgcctagcctgcagcttgttgtcggcggcggtggtcctgcgatggaccgggcgccagaaggcccggggcgcggcgaccagggcgcggcagaagcagcgagccagcctggagaccatggacaaggcggtgcagcgcttccggctgcagaatcctgacctggactcggaggccttgctgaccctgcccctactccaactggtacagaagttacagagtggagagctgtccccagaggctgtgttctttacttacctgggaaaggcctgggaagtgaacaaagggaccaactgcgtgacctcctatctgaccgactgtgagactcagctgtcccaggccccacggcagggcctgctctatggtgtccctgtgagcctcaaggaatgcttcagctacaagggccacgactccacactgggcttgagcctgaatgagggcatgccatcggaatctgactgtgtggtggtgcaagtgttgaagctgcagggagctgtgccctttgtgcataccaatgtcccccagtccatgttaagctttgactgcagtaaccctctctttggccagaccatgaacccatggaagtcctccaagagcccaggaggttcctcagggggtgagggggctctcattggatctggaggttcccctctgggtttaggcactgacattggcggcagcatccggttcccttctgccttctgcggcatctgtggcctcaagcctactggcaaccgcctcagcaagagtggcctgaagggctgtgtctatggacagacggcagtgcagctttctcttggccccatggcccgggatgtggagagcctggcgctatgcctgaaagctctactgtgtgagcacttgttcaccttggaccctaccgtgcctcccttgcccttcagagaggaggtctatagaagttctagacccctgcgtgtggggtactatgagactgacaactataccatgcccagcccagctatgaggagggctctgatagagaccaagcagagacttgaggctgctggccacacgctgattcccttcttacccaacaacataccctacgccctggaggtcctgtctgcgggcggcctgttcagtgacggtggccgcagttttctccaaaacttcaaaggtgactttgtggatccctgcttgggagacctgatcttaattctgaggctgcccagctggtttaaaagactgctgagcctcctgctgaagcctctgtttcctcggctggcagcctttctcaacagtatgcgtcctcggtcagctgaaaagctgtggaaactgcagcatgagattgagatgtatcgccagtctgtgattgcccagtggaaagcgatgaacttggatgtgctgctgacccccatgttgggccctgctctggatttgaacacaccgggcagagccacaggggctatcagctacaccgttctctacaactgcctggacttccctgcgggggtggtgcctgtcaccactgtgaccgccgaggacgatgcccagatggaactctacaaaggctactttggggatatctgggacatcatcctgaagaaggccatgaaaaatagtgtcggtctgcctgtggctgtgcagtgcgtggctctgccctggcaggaagagctgtgtctgaggttcatgcgggaggtggaacagctgatgacccctcaaaagcagccatcgtgagggtcgttcatccgccagctctggaggacctaaggcccatgcgctgtgcactgtagccccatgtattcaggagccaccacccacgagggaacgcccagcacagggaagaggtgtctacctgccctcccctggactcctgcagccacaaccaagtctggaccttcctccccgttatggtctactttccatcctgattccctgctttttatggcagccagcaggaatgacgtgggccaaggatcaccaacattcaaaaacaatgcgtttatctattttctgggtatctccattagggccctgggaaccagagtgctgggaaggctgtccagaccctccagagctggctgtaaccacatcactctcctgctccaaagcctccctagttctgtcacccacaagatagacacagggacatgtccttggcacttgactcctgtccttcctttcttattcagattgaccccagccttgatggaccctgcccctgcacttccttcctcagtccacctctctgccgacacgccctttttatggctcctctatttgttgtggagacaaggtttctctcagtagccctggctgtccaggacctcactctgtagatgaggctggctttcaactcacaaggctgcctgcctgggtgctgggattaaaggcgtatgccaccacaaagaaaaaaaaaa

SEQ ID NO: 680 - DNA, 2524 bp, Homo sapiens
ccctagtttccctccccgggccgcaggagaaacagtgccctctcccttcttgacccctggcccttccctcccttattccctcttgccgccgctgcttctggcgctgccgctcccggaggagctcccgtcacggtgatggggtctcgggcctccacgttactgcgggacgaagagctcgaggagatcaagaaggagactggcttttcccacagtcagatcacacgcctgtacagccgcttcaccagcctggacaaaggggagaacggaactctcagccgggaagatttccagaggattccagaacttgccatcaacccactgggggaccggatcatcaatgccttcttctcagagggagaggatcaggtaaacttccgaggattcatgagaactttggctcatttccgacccattgaggataacgaaaagagcaaagatgtgaatggaccggaacccctcaacagccggagcaacaaactgcactttgctttcagactttatgacttggataaagatgacaagatctcccgcgatgagctgttacaggtactgcgaatgatggtcggagtgaatatctcagatgagcagctgggcagtattgcagacaggaccatccaggaggctgaccaagatggagacagtgccatatcttttacagaatttgttaaggttttggagaaggtggatgtagaacagaagatgagcatccgatttcttcactaaagggcagagaccaaattattcttgctttctagtatttaagaactgaaacttccttctgtcctccagccccaccccatcctgtcatccccctttcccagaatactacagctcctgcatgacaacctgaagtctctcctgtccatacaaacttgcctttggtgtataaacagggcgttacagaatggtaccctgtctatttctgttcggtatccacccatcagtctttattgtaagtaccaacttcccctgttctactgctcagtgccacgcatccgtcctgtctgaggaaagaaacagggactcatgtcaagaaccagccagcaaagctcccactagatgggaccatatccatgctgccttcccttcatcagccctccatcatggtcctgtgtgctgtgtcctgtgtcctgtgtctgtttcttcctacctctctgtcatccagccttctctccattcagtctttcagctgtcctcctgtcgttgagattccctgcattctacttgactctgggctctgctggtaagcctgtttctgatgtggcaggatagttagtggtctggtgatctgtatctaccttctgatgtgggatattgcctatccaggagctattgctctgtcgtcacagggcttatgagcagacatgttcttaaaaggtagtcatggtgaggcttgtagagccatgtctcctaggtggcttcccaggtctctctacctctgactttttattttcaaatatatttatgtggcttttctgggtacagtgttgacattcagaaaatagtctaatgcctgccagtttgcttctctttgggacattgtcaccacccaagcggctgttctgacaatatggtagagggccttcttgtgttttctgacaaggatgggcaccctggagagctgcccacatttgctccacagcatgggttatgcctcagtgttctgtacacttgaagattcttcacatttccaaacagaaagactagtgttacagaagtgcctgacttacctcagtcctaaagaattagattgtcctcagtgtcttaaagttttgcacaaaactctgaatgaattttatacttggcaaattttaatgctggaagatgtatagtcagttcataatcctggtccaggcactgtatgcatcgaatgtattgtctcatgagcttcctaatgacacgaccttcctagctccttgtgaatactatactatgcagatccctcagaagcatgggacctgggactggtggcaccaactgaggtgacattctctgccaatgtcagcttgatttagatgtcactgaatcaagctgcttccgccctgtgttcctgtgaatctgctcttggctggctttctctggtgttgcctgcttgcttgcttgctttgttgctttggaaggctatccaagatatgtaagcaattctttaggaaataaattgctgttaacccaaacaaacaaaaacactgcagacgagatgggtaaaggcgagcagtgggggcgtggctaggacagatggctagggtctacatgaactggggaattctttatgaaatatgtcagactttgtgatcaaatgatgtgatataagaattgtataaagggaataattgtctgatacttatctgtttgagaagtacttcagaagcatcttgatttaattatttaaagtttctaagattatgccccccttggctgtatagcaaactgtttttatccacagttgtgccttattgtcccattaaaattgtattcctcaatccaccaataaattaattgtcgttaaaacaaaaaaaaaaaaaaa

SEQ ID NO: 681 - DNA, 1213 bp, Homo sapiens
agacagactccattctttgtgcagtgaggggctccctgcctcgttgggaggcagcgtagtaaacactgcttcggtgctccagacgcctaagggctttcgttacagcgatgccgaagcgggggaagagagcggcagcggaagacggggaagaacccaagtccgagccagagaccaagaagagtaagggggcagcaaagaaaactgagaaggaggccgcaggagagggccctgtcctgtatgaggaccctccagatcagaaaacgtcagccagtggcaaatctgccacactcaagatatgctcctggaatgtggatgggcttcgagcctggattaaaaagaaaggcttggattgggtaaaggaagaagcaccagacatcttgtgcctccaagagaccaaatgctcagagaacaaactcccggctgaactgcaagagctgcctggactcacccatcagtactggtcagctccatcagacaaagaaggatatagtggtgtgggcctactttcccgccaatgcccgctcaaagtctcttatggcattggtgaggaagaacatgatcaagaaggccgggtgattgtggctgaatttgagtcctttatcttggtaacagcctatgttccgaacgcaggaaggggtctggtaagactggagtaccgacagcgatgggatgaagccttcagaaagtttctaaaggacttggcttcccggaaacctcttgtgctgtgtggggatctcaatgtggctcatgaagaaatagaccttcgtaaccccaaaggaaacaaaaagaatgctggttttactccccaggagcgccaaggctttggggaaatgctacaggctgtaccactggctgacagcttccggcatctctaccccaacactgcctacgcttatactttctggacttacatgatgaatgcccgctctaagaatgttggttggcgccttgattactttttgctgtctcactctcttttacctgctttgtgcgacagcaagatccggtccaaggctcttggcagtgaccactgtcccatcaccctttacctagcactgtgacactcccctcaagtagcttcatgctgggaaatagcctcctctcctccaggagaccagtgcgttatctcttcttcaggtgtttactcccctctaaaccaaacttctggtttcctttaaacaatccaagtgaaataaaagtcctacttttcaac

SEQ ID NO: 682 - DNA, 1608 bp, Homo sapiens
gacagccgaacacttaacgccgcgccggagccaccgcaccagtcgccgagcaggtcccggtcccgctacgtcgtgtcccgcggctctgccgacactccggcctgagagacgggtcttcagccttttctcttccgcccactcagttgtgagccggaaccgtgaaggcccgagggcggaccagaccctctctttttttgaccatcaagtgccaccaccgctatgggcctcaccatctcctctctcttctcgcgcctcttcggcaagaagcagatgcgcattttgatggttggattggatgctgcgggcaagacgacgattctgtataaactgaaactaggggagatagtcaccaccattcctaccattggttttaatgtggaaacagtagaatataagaacatttgtttcacagtttgggatgttggtggtcaagataaaattaggcctctctggaggcattacttccagaatacccagggtctcattttcgtggtagatagcaatgatcgtgaaagaattcaggaaggagcagccgtgctgcagaaaatgcttctggaagatgagctgcaggatgctgtgctgctgctttttgccaacaaacaggatttgccaaatgctatggccatcagtgagatgacagacaagttaggtcttcagtctctccggaacagaacatggtatgtccaagccacttgtgctacacaaggaactggtctgtacgaggggctggattggctgtcaaatgaactttcaaaacgctaaatgaaactggatatctaaccaaggacatgtttgatagaattggtctaggcttgttacaacaaaattagtttgcatcttggttattaaaggatatctgagacggtttgggcagaaattacagcatttaaaacttgttttgttgccaattattgtttaccaagaacaatgttgctgtttagcaatatgcttgggtttaagagaaattctccttgggggaaaaaagtgtccattattatacttcccctgaacctgaatgcctggatagatagcgattgtgacacccttaaataaatctgttttgagtgttttttgagcccacaccaataatgttttaaagttacccccttggaactcactgatacctatcattcctcgggcagtctgctgagttaaaaatgtagcattccatttgtatttatttcccccttgccaaaaagatttttctaataatgcttgtactggccagggatgagctccacaacactattcagttttcttgtactgaggattcccccacctccctcacattattgactcctggcttctatcagccaaactttgatgtagtttggatttgatagctaattctgggctggtttcaaagagttcatattgagataacttttaatactcagcaaattgtcttcctttatattatcttttttatgttgcatgttgccttttggaatcagcctgactctttgcccagcatatgatagttctgctggtattttactgtttactgatgaacatatcttcattaagaattttttgaaaactcatcaaattcaatgaataagttttcttcataacccatttggaattattcctaataaaatgattttt

SEQ ID NO: 683 - DNA, 2073 bp, Homo sapiens
gtctctgtgtggtctcgtcatcagcacagctgggcctacacgcaagcaaccatgtctaagggacctgcggttggcattgatcttggcaccacctactcctgtgtgggtgtcttccagcatggaaaggtggaaataattgccaatgaccagggtaaccgcaccacgccgagctatgttgctttcaccgacacagaacgattaattggggatgcggccaagaatcaggttgcaatgaaccccaccaacacagtttttgatgccaaacgtctgatcggacgtaggttcgatgatgctgttgttcagtctgacatgaagcactggcccttcatggtggtgaacgatgcaggcaggcccaaggtccaagtcgaatacaaaggggagacaaaaagtttctatcctgaggaagtgtcttcaatggttctgacaaaaatgaaggaaattgcagaagcttaccttggaaagactgttaccaatgccgtggtcaccgtgccagcttacttcaatgactctcagcgacaggcaacaaaagatgctggaactattgctggcctcaacgtacttcgaattatcaatgagccaactgctgctgctattgcctatggcttagataagaaggtcggggctgaaaggaatgtgctcatttttgacttgggaggtggcacttttgatgtgtcaatcctcactatcgaggatggaatttttgaagtcaaatcaacagctggagacacccacttgggcggagaagactttgacaaccgaatggtcaaccatttcattgctgagtttaagcgaaagcacaagaaggacatcagtgagaacaagagagctgtcaggcgtctccgcactgcctgtgagcgggccaagcgcaccctctcctccagcacccaagccagtattgagattgattctctctatgagggaattgacttctacacctccattacccgtgctcgatttgaggagttgaatgctgacctgttccgtggcacactggaccctgtagagaaggcccttcgagatgccaaactagacaagtcacagatccatgatattgtcctggtgggtggttctaccagaatccccaagatccagaaacttctgcaagacttcttcaatggaaaagagctgaataagagcattaaccccgatgaagctgttgcctatggtgcagctgtccaggcagccattctatctggagacaagtctgagaatgttcaggatttgctgctcttggatgtcactcctctttcccttgggattgaaactgctggtggagtcatgactgtcctcatcaagcgcaataccaccattcccaccaagcagacccagactttcaccacctactctgacaaccagccaggtgtactcatccaggtgtatgaaggtgaaagggccatgaccaaggacaacaacctgcttgggaagtttgagctcacaggcatacctccagcaccccgtggggttcctcagattgaggttacttttgacattgatgccaatggcatcctcaatgtttctgctgtagataagagcacaggaaaggagaacaagatcaccatcaccaatgacaagggccgcttgagtaaggaggatattgagcgcatggtccaagaagctgagaagtacaaagctgaggatgagaagcagagagataaggtttcctctaagaactcgctggagtcttatgctttcaacatgaaagcaactgttgaggatgagaaacttcaaggcaagatcaatgatgaagacaaacagaagattcttgacaagtgcaacgaaatcatcagctggctggataagaaccagactgcggagaaggaagaatttgagcatcagcagaaagaactggagaaggtctgcaaccctatcatcaccaagctgtaccagagtgctggtggcatgcctggaggaatgcctggtggcttccctggtggaggagctcctccatctggtggtgcttcttcaggccccaccattgaagaggtcgattaagtcaaagtagagggtatagcattgttccacagggacccaaaacaagtaacatggaataataaaactatttaaattggcacc

SEQ ID NO: 684 - DNA, 2073 bp, Homo sapiens; identical to SEQ ID NO: 683

SEQ ID NO: 685 - DNA, 1201 bp, Homo sapiens
agatggcggcagccgaggccgcgaactgcatcatggaggtttcctgtggccaagcagaaagtagtgagaagcccaatgctgaggacatgacatccaaagactactactttgactcctatgcccactttggcatccacgaggagatgctaaaggatgaggtgcgaaccctcacgtaccgcaactccatgtttcacaatcggcatctcttcaaagacaaggtggtgctggatgtgggctcgggcactggcatcctctgcatgttcgctgccaaggcaggggcccgcaaggtcattgggatcgagtgctccagtatctctgattatgctgtgaagattgtcaaagccaataagttagaccacgtggtgaccatcatcaagggcaaggtggaggaggtggagctgcctgtggagaaggtggacatcatcatcagcgagtggatgggttattgcctcttctatgagtccatgctcaacactgtgctgcacgctcgtgacaagtggctggcacctgatggcctcatcttcccagaccgagccaccctgtatgtgacagccattgaggaccgacagtataaagactacaagatccactggtgggagaatgtatatggctttgatatgtcctgcattaaagacgtggccatcaaggagcccctggtggacgtggtggacccaaagcagctggtcaccaacgcctgcctcataaaggaggtggacatctacacagtcaaggtggaggacctgaccttcacctccccgttttgtctgcaagtgaagaggaatgactatgtgcatgcactagtggcctacttcaacatcgagttcacccgatgccacaagaggaccggcttctctaccagtcctgagtctccatacacacattggaagcagactgtgttctacatggaggactacctaacagtgaagaccggcgaggagatttttggcactattggaatgaggcccaacgccaaaaacaatcgtgacttggactttaccatcgacctggacttcaagggtcagctgtgtgagctctcttgttccaccgactaccggatgcgctgaggaggtgccaggctggccctcctgcaaaagggggctcaggggctgggcttgggggatgggagggtacatcgtggcagtgtttttcataacttatgtttttatatggttgcgtttatgccaataaatcctcagctgac

SEQ ID NO: 686 - DNA, 1289 bp, Homo sapiens
cgcggccgcttctcactggcccagagcaagtgaagaccagtggagaatgaacccgttttcctctgagtcagcatggctctgcttgactgccactgcggtgctggggggcatgcttctctgcaaagcctggagttcagggcagctaaggagccaggtggtgtgtctggctggcctctggggaggtgcctgcctgctcagcctgtccctcctctgcagcttgttcctcttatcggtgtcctgcttcttccttctgtatgtgagttcatctgaccaagacttgttacctgtggatcaaaaggctgtgctggtgacaggtgccgattccggtttcggtcatgctttggccaagcacctggacaagctgggtttcacagtgtttgctggagtgctggataaagagggcccaggagcggaggaattgaggaaaaactgctctgagcgcctttcggtgctccagatggatgtcaccaagccagagcagataaaagatgttcacagcgaagtcgcagagaagatacaagacaaaggactgtgggctgtggtcaacaatgctggggtcttgcactttccgatcgacggggaactcattcccatgaccgtgtacagaaaatgcatggcagtgaacttcttcggagccgtcgaggtcaccaaggtgtttctgcctctacttagaaagtccaaggggaggctggttaacgtcagcagcatgggagccatgattccatttcagatggtggccgcctacgcctccacgaaggcagctataagcatgttctcagccgtcatcaggcaagagcttgccaaatggggagtcaaagtcgtgaccatccatcctggaggcttccaaacaaacatcgtaggctcacaggacagttgggataaaatggagaaggagatcctggaccacttttccaaagagattcaggagaactatggacaggaatatgtccatacgcagaagctcgccctcccggtcatgagagagatgtccaacccggatatcacccctgtgctgcgggacatccagcacgccatttgtgccaagaacccctcttccttttattgctcagggagaatgacttacctgtggatctgcttcgcggcctactccccgatcagcttattggactatattttgaaaaactattttactccaaaactcatgccaagagctttaaggacagcaagttagaagaacaagggcccgggtagggtgggaaatgccacatgcttaggatgaaagggaaacctcttattaaactaactttctacctcaaaaaaaaaaaaaa

SEQ ID NO: 687 - DNA, 2535 bp, Homo sapiens
gagcagtaccccggccactgccagtgtgtgcgtggtgcaggatagactcatggcttcgcctctgaggttcgacgggcgtgtggtcctggtcaccggcgccgggggagggttgggcagagcttatgccctggcttttgcagaaagaggagcattagttgttgtgaatgacttaggaggggacttcaaaggcgttgggaaaggctcttctgccgcagacaaggtcgtggaagaaataagaaggagaggcgggaaagcggtggccaattacgattcaggcgaagcaggcgagaagcttgtgaagacagcactggacacattcggcagaatagatgttgtggtgaacaatgctgggatcctgagggaccgttccttctctaggataagtgatgaagactgggatataattcaaagagttcatttgcggggctccttccaagtgacccgggcagcatgggatcatatgaagaagcagaattatggaagaatcattatgacggcctcagcttctggaatatacagcaactttggccaggcaaattatagtgctgcaaagctgggccttctgggtctcgccaatactctcgtgattgaaggcaggaagaacaacattcattgtaacaccattgccccaaacgctgggtcacggatgacagagacggtgatgccagaagacctcgttgaagccctgaagccagagtatgtggcaccgctggtcctttggctttgccatgagagctgtgaggaaaatggtggcttgtttgaggttggagcaggatggattggaaaattgcgctgggagaggaccctgggagccattgtcaggaagcggaatcagcccatgactcccgaggcagtgagggacaactgggtgaagatctgtgacttcagcaatgccagcaagccgaagagcattcaagagtccacaggtggtataatcgaagttttacataaaatagattcagaaggaatctcacaaaatcacaccggtcaagtggcatctgcagatgcatcaggatttgctggcgtcgttggccacaaacttccttcattttcttcttcatatacggaactgcagtgcattatgtatgccctcggagtaggagcttcagtcaaaaatccaaaggacttgaagtttgtttatgaagggagtgctgacttctcctgtttgcctacatttggagtcattgtcgctcagaagtccttgacgagtggaggcttagcagaggttcctgggctgtcaatcaactttgcaaaggttcttcatggggagcagtacttggagttgtataagccacttccccgatcaggggaattaaaatgtgaagcagttattgctgacatcctggataaaggctctggcatagtgattgttatggacgtctattcttattctggcaaggaacttatatgctataatcagttctctgtcttcgttgttggctctggaggctttggtggaaaacggacatcagaaaaactcaaagcagctgtagccgtaccggatcggcctccagatgctgtactgagagataccacttcactgaatcaggccgctctgtaccgcctcagtggagactcgaatcctttacacattgacccgagctttgcgagcattgccggttttgagaaacccatattacacggattatgtacttttgggttttctgcaaggcatgttttacagcagtttgcggataatgatgtgtcaagattcaaggccattaaggttcgttttgccaaaccagtgtatccaggacaaactctacaaactgagatgtggaaggaaggaaacagaattcattttcaaaccaaggtccaagagactggagacattgtcatttccaatgcatatgtggatcttgttcctacatctggagtttccgctcagacaccttctgagggtggagcactgcagagtgctcttgtatttggggaaataggtcgacgcctcaaggatgttggacgtgaggtggtaaagaaagtaaatgctgtatttgaatggcatatcacgaaaaatgggaatgttgcagccaagtggaccattgacctgaagaacggctctggagaggtttaccaaggccctgccaaaggctctgctgacacgaccatcacaatttctgatgaggatttcatggaagtggtcctgggcaagcttaacccacagaatgccttcttcagtggcagactgaaggcccgaggaaacatcatgctgagccagaagctacagatgattctgaaagactatgccaagctctgaaggacccactgcgtgctttaataaaaccagaatcattacgttctgtctacgcagtcatgctccagccttctttgaaacgatccacggtaatgtgcagcagaaatcgcttaacattttcagattcagataactttcagattttcattttctactaatttttcacatattatttttataaggaactgtaatctagctagcaaataattgttctgttcatagatctgtatcttaataaaaaaaaagtcaaccgaaaaaaaaaaaaaaaaaaaaaaaaaaaa

SEQ ID NO: 688 - DNA, 2535 bp, Homo sapiens; identical to SEQ ID NO: 687

SEQ ID NO: 689 - DNA, 961 bp, Homo sapiens
acccgggggtagtcatggcggctcggtgcgtgaggctggcgcggcgcagcctcccggctttggcgctgtcgttcaggccttctcctcgcttgttgtgcacagctacaaaacaaaagaacaatggccagaacctggaagaggacttggggcattgtgagccaaagacagatccatcctctgcagacaagaccctcctggaagagaaggtgaagctggaagagcagctgaaggagaccatggaaaaatacaaacgtgctttggcagataccgagaatctacggcagagaagccagaagctggtagaagaggccaagttatatggcatccagggtttctgcaaggacttgctggaggttgcagacatcctagagaaggcaacccagagtgttccaaaggaggaggtcagcaacaacaaccctcacctgaagagtctttatgaagggctcgtgatgactgaagtccagattcagaaggtgttcacaaaacacggcttgctcaggcttgaccccattggggcaaagttcgacccttatgaacatgaggccttgttccacacccctgtggaggggaaagaaccaggcactgtggcactagttagtaaggtgggctacaagctgcatggacgcaccctgaggccagctttggtgggggtggtgaaggacgcttagctctctccctcaaggctctggactttgtaggtcacttgctagaactcaaagggtgggcgggcttgtaatttctcatctgtgaacacatctgacccttgcccagccttgttggaaatcttaagtaagctaagcagaacatgaagctgcttgcacactgtgtcagagactctgggagtctggtcattgagtttagcattacctacttcagaagagggccagcagggcctcaggagtagcatgctaacgttgtatctgttccaccttgtgattaagtactttacacaaataaaagg

SEQ ID NO: 690 - DNA, 1595 bp, Homo sapiens
aggacaaacatcgatcagggtcaaattgacaataaaagggctggagcaagcaacagggactcaccaaccaggcctcgcctctgagttcagcccagagctagctgggaaatgttccggatgttggccaaggccagtgtgacgctgggctccagggcagcaagttgggtacggaacatgggctcgcaccagctgctggtgccacccccagaggccctgagcaagcccctgtcaattcctaagaggctcctgttgggtccgggaccctccaacctggctcctcgtgtgctagcagctggaagtctgaggatgattggccacatgcaaaaagagatgtttcagatcatggatgagatcaagcagggcatccagtatgtgttccagaccaggaaccccctcacactggttgtcagcggctcaggacattgtgccatggagactgccctgttcaacctcctggagcctggggactcctttcttgtgggaaccaatggcatctgggggatacgggctgcagagatcgctgagcggattggagcccgtgtgcaccagatgatcaagaagcctggagaacattacacactgcaggaggtggaggagggcctggctcagcataaaccagtgttgctgttcctgacccacggggagtcatccactggtgtgctgcagcccctggatggtttcggggagctctgccacaggtatcagtgcctactcctggtggactcggtggcatcattgggcggagtccctatctacatggaccaacaaggcatcgacatcttgtactctggctctcagaaggtcctgaatgccccaccagggatctccctcatctccttcaacgacaaggccaaatccaaagtctactcccggaagacaaagccagtctccttctacacagacatcacttatttgtccaagttgtggggctgtgagggcaagaccagagtaattcatcatacgttgcctgtcatcagcttatactgcctgagggagagcctagcactcatttcagagcagggcctggagaattcctggcggcgtcacagggaggctacagcacatctgcacaagtgcctgcgggagttgggcttaaagttctttgtgaaggacccggaaatccggctacctacaatcaccaccgtgaccgtgcctgccggctacaactggagggacatcgtcagctacgtgctggaccacttcaacattgaaatctctggtggtcttgggccctctgaggataaggtgctgcggattggcctcctgggctacaacgccaccacagagaatgcggaccgtgtagcggaggccctgagggaggccctgcaacattgtcctaagaataaattgtgagcatcgtctcaccagactgtgccctcctggaggggctgggaatatagcaggaacgagaagactgtgcaagccctccagccagcaaaggctgccgatgtaaccaggcgggaagggtcagggcgaagctgcccctctccccacagatggagccctgtggtcacatgatgctaatcaccttccgatgaagctgcattctgcaggccactggacttcgggaatattcaataaagtacttgccagac

SEQ ID NO: 691 - DNA, 1595 bp, Homo sapiens; identical to SEQ ID NO: 690

SEQ ID NO: 692 - DNA, 1595 bp, Homo sapiens; identical to SEQ ID NO: 690

SEQ ID NO: 693 - DNA, 2442 bp, Homo sapiens
gaagggcctggctgcagcggcggccggccctcgccctccttctctggagcgggcggagtccatacttccgcggggcggggtctgcccagtgctgacgttggcagccgaacccgaactagttcgaggttgccggctgcactgtcgggtggttggactctttcctcccggtcctgcggccctctttctccggcgcgccgcccctcggttgctcagaccgctgtgatcggaggttgccggtgctccagcgcttggcgtcccggcccagtggccgtaggcggcgtaggcaccgcgagccgagcctcccggtggccggggaacggcaagcgagcgagtccgagaggttcttggggcaggtggcgccgcgaagatggtcgccaagcagaggatccgtatggccaacgagaagcacagcaagaacataactcagcgcggcaacgtcgctaagacctcgagaaatgcccccgaagaaaaggcgtcggtaggaccctggttattggccctcttcatttttgtcgtttgtggatctgcaattttccagattattcaaagtatcaggatgggcatgtgaagtgactgaccttgagatgtttccattctcctgtgaattttaacttgaactcattcctgatgttcgatgccctggttaaaaacaattcagtaaatcaccctgcctcagaatgactttttcatatcaaccttcatgtgtcattccaaggtttcttcaagagtcattccaggtttgctagtccatgccacagtgccttgcaaaagcaccacatgaataaagcaataaaatttgattattaagttccagtagtagaccatacttattcagtacagaatgagttttatgtggttattaaaacttatgactaattagattaaatctgtgtagacagggtatagattttgttaaccctaatgtgtaaatgcaattagctaatttaaattttggaaacttaaggttttatatagctaggcactttactactcttggattgaaaaagcacactccattatagggacatgtaactatcctataatcaggtgcttataaatggacaactacacggcctagttttaccacaatcattgtcacctaaatttttttaaaaactcctagggcatatgtaagtggagatgctcactgctgcatctgtttctaatgataatgtttctgttacacagccttgagttttgcatgagtaagtatagtcacctaggatcccatttgagactgggttgagcattttgtaacttaatcaaagtgactgcagtttcactaaaagctatcatggtgagatgaaattagggatggtttgctgatgtcatacagatcagaattaacttatcaaggggtttactgtgtagaaaaaaagttaaggggaaaagtctacaagaagtaaatgccttgtcaaaatatgtggaatcctgtgtgccatatgatatcttagcatgtgaattgcacttttaataccaaaaaggcacatcaactaaaaagttatgattgaaatgcccttagggttctaggtatgtcaacctaaactagcatttggagttaaatgaatttactgataaggatcagtctagtcttcctctgtatgacttagtaggttgtgattggtcagatttcctttttactaacggtaagggtgagagtgatgaggcaggtttgaggttttctggtactattgaaaactgcaagtcctgactatgcacttagccagaacttggtgtagacaccaagcaatatctgtgtatgaattggaagaaacctgcttatgtttgctttgttatttgcctcaggagatctcttttgaaataagctgttttcaaaggaacagaagggaaacttgctacctgttctgagagcagtgtaaacctcacaggactttggatctcctcagatgtagaggagaatgaaggaaaggaatagttagggatgcacaggaatttatctgtctctgatcaggaaagaaagctggctatgggtctgcaggggcatgactgatggttgtctgcctcttttcaccctgtaagtgaatccctgaactggattcactgaagcaagtcttggttaactaattctattttactataactttaaaagtgaaaaatattctctaaatttatagcaggtgccttatttcctttgaatcaaatcattccataccagaatttcccttggtttactattagataattggctttaagatacttttgttttgaaacatacagtgttttaattgatttgttaaattgctgtagccatcaatcatttcacatttgtaaaatacattccctttgtatcatgtaatttgcctattcagtgcattttatattcaggttgggttatgcatatttgggtcaatgaaagttgtgtctgtttgatttatgctttaaaaataaagttccctggatatttgaaaaaaaaaaaaaaaa

SEQ ID NO: 694 - DNA, 929 bp, Homo sapiens
cctaaaccagctccagcactccagactccagccacactccaacagagcaccatggtctcagccacccgctcgcttctctgtgcagcgctgcctgtgctggccaccagccgccaagccacaggggcgcccgtcgccaatgagctgcgctgtcagtgcctgcagacagtggcagggattcacttcaagaacatccagagtttgaaggtgatgccgccaggaccccactgcacccaaaccgaagtcatagccacactcaagaatggtcgcgaggcttgccttgaccctgaagcccccatggttcagaagattgtccaaaagatgctaaagggtgtccccaagtaatggagaaagaagatagattgcaccgatggcgtctgtctggtgaacgctggcttctgacaacactagttttacacattttacgatttctattgagggtcctatttattttatgtatttatttattccaccaagtgtgtggtttttattttacattaatatttaacgatgtggatgcgtttcatcgatggtcgttcaattccaattgtgcagtttaaagatggtaggcgttaaatatctcgttaaattaatatttattgggagaccattaggtgtcaaccactgtgctagaaggtgttgagcgggaagaagggcggagagatgagagtctgggatcgtgttttgtgttagggtgaggaatgtgtgagaggctatgttgtatgttttgaaagaatgttatttattgaaagttgtctttcatattttatggtcaacattgatgtgttgaagcttcccttggacattttatgtctagtttgtagggcacaatgccttttatattctttaaccaatgctccttctcgtctcaggacagagaagttcaaaggactgttacaaatgaaataaaaataaaagttttattaaaaaat

SEQ ID NO: 695 - DNA, 1884 bp, Homo sapiens
caagcctttgctggagaccgctcctgtccagtccgcagctggcttcagcgccactcaggacaccggaaagatggcaccgattgccggcaagaaggccaagaggggaatcttagaacgcttaaatgctggcgaagtcgtgatcggagatgggggatttgtctttgcactggaaaagaggggctacgtaaaggctggaccctggaccccagaggctgcggtggagcaccccgaggcagttcggcagcttcatcgggagttcctcagagctggatcgaacgtcatgcagaccttcactttctatgcaagtgaggacaagctggaaaaccgagggaactacgtggcagagaagatatctgggcagaaggtcaatgaagctgcttgtgacattgcacggcaagttgctgacgaaggggatgcattggttgcaggaggtgtgagtcagacaccttcctacctcagctgcaagagtgagacggaagttaaaaagatatttcaccaacagcttgaggtcttcatgaagaagaatgtggacttcctcattgcagagtattttgaacatgttgaagaagccgtgtgggcagtcgaggccttaaaaacatccgggaagcctatagcggctaccatgtgcatcggacctgaaggagatctacatggcgtgtctcctggagagtgcgcagtgcgtttggtaaaagcaggtgccgccattgtcggtgtgaactgccacttcgaccccagcaccagcttgcagacaataaagctcatgaaggagggtctggaagcagctcggctgaaggcttacttgatgagccacgccctggcctaccacacccctgactgtggcaaacagggatttattgatctcccagaattcccctttggattggaacccagagttgccaccagatgggatattcaaaaatacgccagagaggcctacaacctgggggtcaggtacattggcggctgctgcggatttgagccctaccacatcagggccattgcagaggagctcgccccagaaaggggatttttaccaccagcttcagaaaaacatggcagctggggaagtggtttggacatgcacaccaaaccctggatcagggcaagggccaggaaagaatactggcagaatcttcgaatagcttcgggcagaccgtacaatccttcgatgtccaagccggatgcttggggagtgacgaaaggggcagcagagctgatgcagcagaaggaagccaccactgagcagcagctgagagcgctcttcgaaaaacaaaaattcaaatccgcacagtagccacaggccagcggttcggggcgaattcctccaggtccgggccacagtgtgcacccggaaggagaaggcatctctaaaccagcgtttgtgttgatgccggcttacacctgtgattggtgctagttagacaaaatggagtcacagatagcatttcacagttacaaaactacgctttagaattttacctagaaggaagaaaggagaagtccacagtaaatcctgaacacatttcctacgtgcctgtcgcattacaggcgcacaggagtcactgcagcgaagagaaagtcacccgacgtcaatctcatttcagatagggggataggacaccacctccacgagtgacatagaaccattcagggaccgtatcataagtgacacagcaaccatctatatctaagatgcttcccaagtggattccaagatcttttgagcaggacccttaggcagaaacaacacacaccagccctgtaaaacttaacagataactgatccattctgtaattctgtaatctctgttctgactgcttccattccatttcattaataaaaacatgccggttgaaaaccttcaaaaaaaaaaaaaaaaaaaa

SEQ ID NO: 696 - DNA, 2207 bp, Homo sapiens
gtctcccggctgtgcttggccgtgcggagggccggtgccagcacctccagctccgggacagcagcgggagccaagcccgagccgcaggcgtcgtcgccatgcgctggttccgggcgctgttgaagaatgcgtccctggcaggggcgcccaagtacatcgagcacttcagcaagttctccccgtccccgctgtccatgaagcagtttctagacttcggatccagcaatgcctgcgagaaaacttcattcaccttcctccggcaggagctgcccgtgcgcctggccaacatcatgaaagagatcaacctgcttcctgaccgggtgctgagcaccccctcagtgcaactggtgcagagctggtatgtccagagtctgctggacatcatggaattcctggacaaggaccccgaggaccaccggaccctaagccagttcactgatgccctggtcaccatccggaaccggcacaatgacgtagtgcccaccatggcacagggagtgttggagtacaaggacacctatggtgatgacccagtctccaaccagaacatccagtactttttggaccgcttctacctcagccgcatctctatccgcatgctcattaaccagcacaccctcatctttgatggcagcaccaacccagcccaccccaaacacattggcagcattgatcccaactgcagcgtgtctgatgtggtgaaagatgcctatgacatggctaagctcctgtgtgacaagtattacatggcttcccctgacctggagatccaggaagtcaatgccaccaacgccacccagcccattcacatggtctacgtcccctcccacctctaccacatgctctttgaactcttcaagaatgccatgcgggccacagtggaaagccacgagtccagcctcactctccctcccatcaaaatcatggtggccctcggtgaagaagatctgtccatcaaaatgagtgaccgaggcgggggtgtccccttgaggaagatcgagaggctcttcagctacatgtactctacagctcctacaccccagcctggcactgggggtaccccgctggctggctttgggtatggactccccatttcccgcctctacgccaagtacttccagggggacttgcagctcttctctatggagggctttgggacagatgctgtcatctatctgaaggccctgtccacggactcagtggagcgcctgcctgtctacaacaagtctgcctggcgccactaccagaccatccaggaggccggtgactggtgcgtgcccagcacagagcccaagaacacatcgacgtatcgggtcagctaggggccttctcttcctggcacctgggaggatgctgccacctctgaatccagccaccacagggacttccctatctatcccctggggtacgggggtgaaactgggtctccccgatggccagatctgtctttgtagaaatcgcagtggcccatctgtggcgatccctaagtgccaatctgtctctatggagaaacctagggggtttccctggagcctggtctccatggtgatgatgcttgagggttggggacggctctacctggtggggtggccccagagacacttctcccaagaccagagctgtctgttttctaccagaaaccctgggtccccctcactgcctgcatagtcctggtctcccacgtggctgcctcgcttgccttatgcccacaccctgtacaggcacattgggctggtttcttcgtcagtagtaagaaagatggagagagactggggaaacgggggccaaccttgtctctggtcctgcagcctctctccatctccactctggacactaaagttgccactgggaacttgagaatgggtggccgttctcacccaaggcccaccgagaaggcctaagagtaacctgtccccaaggcgatcttagcaatgtttctgccgcttcctggcctggcatgtcctcacgtgtatacctcccctgcccagtgtacgctcaccctatccctgcttgagctttagaccccagacttcctatgcccactatgtgtgcacagacgactcaaacccaggatgccccatgtacatagccagttttgtaatctcagatgcctcacccttgccctccgcacacaggggttaaagccgtgtgcccctcccagtggctgggatggtgacagtgacatccacagtaaatagatgaaatga

SEQ ID NO: 697 - DNA, 2207 bp, Homo sapiens; identical to SEQ ID NO: 696

SEQ ID NO: 698 - DNA, 2208 bp, Homo sapiens; identical to SEQ ID NO: 443

SEQ ID NO: 699 - DNA, 2208 bp, Homo sapiens; identical to SEQ ID NO: 443

SEQ ID NO: 700 - DNA, 1786 bp, Homo sapiens
gggtctgctgggattgggactttcccctcccacgtgctcacactggctaaagttctgaagctccagttcattgggactttccttgctataggtagcgactacagttagggggtacctggcatccgggcccgcaccctacttcccagcagggtgtcacgctcccctgaagactggataactgtcatggaggattcacagtcggatatgagcatcgagctccctctgagtcaggagacattttcatgcttatggaaacttcttcctccagatgatattctgcccaccacagcgacagggtcacctaattccatggaagatctgttcctgccccaggatgttgcagagttgttagaaggcccagaggaagccctccaagtgtcagctcctgcagcacaggaacctggaactgaggcccctgcacccgtggcccctgcttcagctacaccgtggcctctgtcatcttccgtcccttctcaaaaaacttaccaaggcaactatggcttccacctgggcttcctgcagtcagggacagccaagtctgttatgtgcacgtactcaatttccctcaataagctgttctgccagctggcgaagacatgccctgtgcagttgtgggtcacctccacacctccacctggtacccgtgtccgtgccatggccatctacaagaagtcacaacacatgactgaggtcgtgagacgctggccccaccatgagcgttgctctgatggtgacggcctggctcctccccaacatcttatccgggtggaaggaaatccgtatgctgagtatctggacgacaggcagacttttcggcacagcgtggtggtaccgtatgagccacctgaggtcggctccgactataccactatccactacaagtacatgtgcaacagctcctgcatggggggcatgaaccgccggcccatccttaccatcatcacgctggaagactccagtgggaatcttctgggacgggacagctttgaggttcgtgtttgtgcctgtcctgggagagaccgtcggacagaggaagaaaatttccgcaaaaaagaagagcattgcccggagctgcccccagggagtgcaaagagagcactgcccaccagcacaagctcctctccccagcaaaagaaaaaaccactcgatggagaatatttcacccttaagatccgtgggcgtgagcgcttcgagatgttccgagagctgaatgaggccttggaattaaaggatgcccgtgctgccgaggagtcaggagacagcagggctcactccagctacccgaagaccaagaagggccagtctacgtcccgccataaaaaaccaatgatcaagaaagtggggcctgactcagactgacagcctctgcatcctgtccccatcaccagcctccccgtcccctcctttcttgccattttatgactttagggcttgttatgagagctgacaagacaatgctagtcccttcactgcctttttttaccttgtagatagtactcggccccctctatgcaaactggttcctggcccagattggggaatgggttggtagttgctgggtctctgctggtccagcgaaatcctatccggtcagttgttggacctggcacctacagtgaaatttcaccccaccccaccgcctgtaagattctatcttgggccctcatacgatctgtatcctccggacccatttcctccactctgcaaagcctgtctgcatttatccatcccccacccctctccctctttttatctctttttatatatccaatttcttattttacaa

SEQ ID NO: 701 - DNA, 1437 bp, Homo sapiens
ggggacccaagaccgtccacgtagcctgtgcgcatgcacagtttcgggaccccggcccgtccagacgttcgtggtggagtgagaggttcccaggggaggaatgtgcaaagtccctgctttggcttctaccccctcttctacttcgcaggacagcgggggtctcctgcgtcctgcgcgtagttctggaagccgggccctcgctcctccctggggtggggctgctgcttctccgccagacttaagccggggcctgctggctcagtactggagtgcagagctgaattctggccactttgtcttctccacagcctgtgctcattgccaaggggacaatgacggcctccagtgtcctcctgcacactggacagaagatgcctctgattggtctggggacatggaagagtgagcctggtcaggtgaaagcagctattaaatatgcccttagcgtaggctaccgccacattgactgtgcttctgtatatggcaatgaaactgagattggagaggccctgaaggagagtgtgggagcaggcaaggcagtacctcgagaggagctgtttgtgacctccaagctgtggaatactaagcaccaccctgaggatgtagaacctgctgtccggaagacgctggctgatctgcagctggagtatttggacctctatttgatgcattggccttatgccttcgagcggggagacaatccctttcccaagaatgccgatggaactgtcaaatatgactccactcactataaggagacctggaaggctctggaggcactggtggcaaaggggctggtgaaagccttgggcttgtccaacttcagcagtcggcagatagatgatgtcctcagtgtggcctcggtgcgcccagctgtcttgcaggtggaatgccatccatacctggctcaaaatgagctcattgcccactgtcaagcacgaggcttggaggtgacagcttacagccccttgggttcatcggatcgtgcttggcgccaccctgatgagccagtcctgcttgaggaaccagttgtcttggcactagctgaaaaacatggccgatctccagctcagatcttgctcagatggcaggttcagcggaaagtaatctgcatccccaaaagcatcactccttcccgcatccttcagaacattcaggtatttgatttcacctttagtccagaggagatgaagcaattagatgctctgaacaaaaattggcggtatattgtgcccatgattacggtggatgggaagagagtccccagagatgctggacaccctctgtatccctttaatgacccatactgaggcccgtagtttctcagcttccctttcagttctcctgctaagcattgcctgctactcccaagaaagaaggactcaataaagccattgaagtgtaaataaaaaaaaaaaaaaaaaaaaaaaaaaaaaa

SEQ ID NO: 702 - DNA, 1726 bp, Homo sapiens
cgatcgcgcaagtcggacccgtggatcacagcctgtagatcgcggcccgggcctggaggacaacagcaagtgaagggggttcctcttcctgaaggaggggtcatggccttcttgttgactacccgacggctggtctgcagttcccagaaaaacctccacctcttcacacctggatccagatacatcagccaagctgctgccaaagttgactttgagtttgattatgatggaccactcatgaagacagaagtcccgggccctagatctcaggagctaatgaaacagctgaacacaatccagaatgcagaggccgtgcactttttctgcaactacgaagagagccgaggcaactacctcgtggacgtggatggcaaccgcatgttggacctgtattctcagatctcctctgtacccatcggttacaaccatccggctctggcgaaactcgttcaacagcctcaaaacgcgagcactttcatcaacagacctgccctgggcatcctgcctccagagaactttgtggacaagctccgggagtccttgatgtcggtggcgcccaaaggcatgtgtcagctcatcacgatggcctgcgggtcctgctccaatgagaatgcattcaagaccatcttcatgtggtaccggagtaaagaacgaggtcagagaggtttctccaaagaggagctggagacttgcatggttaaccagagtcctggatgcccagactacagcatcctctccttcatgggtgctttccacgggaggaccatgggttgcttagcgaccacacactccaaagcaattcacaagattgacatcccttcctttgactggcccattgctccattcccacggctgaaatatcccctggaggagtttgtgacggacaatcagcaagaggaggcccgctgtctagaagaggtggaggatctaattgtgaaatatcggaaaaagaagagaacagtggctgggatcatcgtggagcccatccagtccgaaggtggagacaaccacgcatcagatgacttcttccggaagctgagagacatagccaggaagcatggctgtgccttcttggtggacgaggttcagactggaggaggctgtacaggcaagttctgggcccatgaacactggggcttggatgacccagccgacgtgatgtcgttcagcaagaagatgatgactgggggcttcttccacaaggaggagtttcgaccaagtgctccttaccggatcttcaacacctggctgggggacccatccaagaacttgctgctggctgaggtcatcaacatcatcaagcgggaagacctgctcaacaacgtggcccatgccgggaagaccctactgaccgggctgctggacctccaggcccagtacccccagttcgtcagccgggtgaggggacgaggcaccttctgttccttcgacactcccgacaaagccatacggaataaactcatcctaattgccaggaacaaaggtgtggtactggggggctgcggtgacaaatccatacgtttccgtcccacgctggtcttcagggatcaccatgcccacttgttcctcaacattttcagtggtatcttagcagacttcaagtaaagaagccatctccacgacattcagagaaagctctgtcccagcggtgtcaacttgattagtttgcctaattcatattttcacttcaaagtttatcagaggcgaatgcataaactaaagggtc

SEQ ID NO: 703 - DNA, 1726 bp, Homo sapiens; identical to SEQ ID NO: 702

SEQ ID NO: 704 - DNA, 3102 bp, Homo sapiens
cggggaaagcagcggactacaagagactgaactgtatctgcctctatttccaacggactcacgttcaactttcgctcacgaaaatagccgggaaaattttattagtcctttttttaaaaaaagttaatataaaattatagcaaaaaaaaaaaaaggaacctgaactttagtaacacagctggaacaatccgcagcggcggcaggagcggcgggagaagagtttaatttagttgattttctgtggttgttggttgttcgctagtctcacggtgatggaagctgcacattttttcgaagggaccgagaaactgctggaggtctggttctccagacagcagtccgacgcaagccagggatctggggaccttcgtaccatcccaagatccgagtgggatgtccttctgaaggatgtgcagtgctcaatcataagtgtgacaaagactgacaagcaggaagcttatgtactcagtgagagtagcatgtttgtctccaagagacgtttcattttgaagacatgtggtaccaccctcttactgaaagcactggttcccctgttgaagcttgctagggactacagtgggtttgactcgattcaaagcttcttttattctcgtaagaatttcatgaagccttctcaccaagggtacccacaccggaatttccaggaagaaatcgagtttcttaatgcaattttcccaaacggagcaggatattgtatgggacgtatgaattctgactgttggtacctgtacactttggatctcccagagagccgagtaatcaatcagccagatcaaaccctggaaattctgatgagtgagcttgacccagcagttatggaccagttctacatgaaagatggtgttactgcaaaggatgtcactcgtgagagtggaattcgtgacctgataccaggttctgtcattgatgccacactgttcaatccttgtggctactcaatgaatggaatgaaatcggatggaacatattggactattcacatcactccagaaccagaattttcttatgttagctttgaaacaaacctaagtcagacctcctatgatgacctgatcaggaaagttgtggaagtcttcaagccaggaaaatttgtgaccaccttgtttgttaatcagagttctaagtgtcgcacagtgctttcttcgccccagaagattgacggtttcaaacgtcttgattgccagagcgctatgttcaacgattacaattttgtttttaccagttttgctaagaaacagcaacaacagagttgattaggaaaaatgaaaaagaaaaaacgcaaaaagagaagacacacaggaggtggtggctgctttctagatgttgatcctgggggccatgctgaccgtgaccaccaccttgtagctgcagaaagccctaggtgtaatgatagtgtaatcattttgaagtgtatgcattattatatcaaggagttagatatcttgcatgaatgctctcttctgtgtttaggtgttctatgccactcttgctgtggaactgaagtgcatgtagaaaagaactctgactgtatgaatctttacgacacttgtgaaaacgattcgacttggtttatgcacagcgtaatatttctgcaggcatcgtccaaaatcccccacagacaaggctttcgtccccattagatgcggcctcagctgaccattggcgactgttctatttgctgccagagtttttacatccagttacctccactttctagagcatattctctactaatgttcaaaaccgatttctacttcatacgggtgtcttatgcaatggcaattaaagttttcttccacaagttgagtctttgtaaggaaatgattccagttgcttgttttgtgttctactgttttagtaattgctcctgcatttatagtcctatggtttttcactacccctgatgaagcaatacacggtcacactgtgggcttacattgtaatcttcaccccagatgggagctcagagacggtcccttgctcatttttccctaagatgtagaatgtggccttgctattggcatgcccttctgtggaagataaatgatggaagtgaaagtatcccgggggtgagcaaggagaaccaccccatggcagtgatgggcttggcagtgcactccgagctctcacagtggagtgcccaccatgccttcactaactcactgagcagtgataggatgcccaccaagtcagagcagaaatctaaccctaaggattctcacctcggtaagtgccgccattgccaccactttactaaaggaagtttccgctcagaggagagtctgtacttcccgcctgtcctaatgtcagctgttctctctggtctttcaccatggcgttcagatgctcaaatgaatggctgatcggccgcagggaggactctccgggttactgggcctggagaatggagaaacaggcacggtattctgacagttaatggcaccagagatgcgggctttcaagagctggcctgttagtggcatttttaagcagaaaagagcaaactagacgaagttccctatttattgccctcccactgtttccttggcagtttctggactggcgcaatgatgccttgttccttccgtatttataacgaagctaaaaagcgtttctaagcatggagtctacttggtttgaaatcaagtggttggaacactgtctggatttttactttacgcagtgttgattgaacgcttcgttggggaagccttcagtccgcttcatcggtctgttctgtaatgagcacagcacacctagtttgaattgctgtttggagggccagtgcttatttgagctgggtcttgtaacccagtagattttggcttgaggtctgactcccccatcttacgaaattaagaattctaatgttggaaattgcatagggtttgcgtggaaaaaagcccagggaaaaaaaaaaaaaaacagaaggcggactagtgatctagtgtgattacaggcggggaagttttggtgccataatttctttgttggtgttggacttttaatcagctgaaatgtatttctgtaccacaatgtaagcttcaataaaagtttgcttaattgtctagtaacatccag

SEQ ID NO: 705 - DNA, 3320 bp, Homo sapiens
ctccctgcccaccagcatcatggccaagggtttctacatttccaagaccctgggcatcttgggcatcctgttaggtgtggcagccgtatgcaccatcatagctctgtcggtggtctacgctcaggagaagaacaggaatgcggagaactctgccatagcccccacgctcccaggcagcacctcagccaccacctcaactaccaaccctgctatagatgaaagcaaaccttggaaccagtatcgcttgcctaagactcttatacccgactcctaccaggtgaccttgaggccttacctcacccccaacgagcagggcctgtacatcttcaaaggttccagtactgtccgctttacctgcaacgagaccacaaatgtcatcattatccacagcaagaagctcaactacaccaacaaagggaaccacagggtggcgttgcgagccctgggtgacactccggcacctaacatcgacacaacggaactggtagagcgcacggagtacctggtggtgcacctgcagggctccctggtaaagggccatcagtacgagatggacagtgagttccagggggagctggctgatgatctggctggcttctaccgcagcgagtacatggaaggtggcaacaagaaagtggtggccaccacacagatgcaggctgccgatgctcgaaaatcctttccttgcttcgatgagccagccatgaaggcctcattcaacatcacgctcatccaccccaacaacctcaccgctctgtctaacatgcttcccaaagattccaggacccttcaggaagatccttcctggaacgtcactgagttccaccctaccccgaagatgtccacatacctgctggcctatatcgtgagcgagttcaaatatgtagaagccgtctcacccaatagagtccagattcgaatctgggctcggcccagtgccattgatgagggccatggtgattacgctctgcaagtcacaggccctatcctaaacttctttgcccaacattataatacagcctaccctctagaaaaatctgaccagattgccctgcctgacttcaacgctggagccatggagaactgggggctcgtgacctaccgagagagtgccctggtctttgaccctcagtcctcctccattagcaacaaggagcgggtggtcactgtgattgcccatgagctggcccatcagtggtttggcaacctggtgaccgtggattggtggaatgacctgtggctgaacgagggctttgcctcctatgtggaatttctgggtgctgactatgcagagcccacctggaatctgaaagacctcatagtactgaatgatgtgtaccgtgtgatggccgtggacgcgctcgcttcctcccacccgttgtccagccctgccaacgaggtcaacacgccagcccagatcagtgagctgtttgacagcatcacctacagcaagggagcctcagtccttaggatgttgtccagcttcctgacagaggacctgttcaagaagggcctttcgtcttacctccacaccttccaatactcgaacaccatttatctggacctgtgggaacaccttcagcaggcagtggacagtcagacagctatcaaactcccagcctcagtgagcaccatcatggaccgatggattctacagatgggttttcctgttatcactgtgaacaccagtacgggagaaatctaccaggaacacttcctcctggaccccacttccaaacctacccgcccctcagattttaattacctctggattgtgcccattccgtatctcaaaaatggaaaggaggatcactactggctggagaccgagaaaaaccagagtgcagaattccaaacatcctccaatgaatggctcttactgaacattaatgtaaccggctactaccaggttaactatgatgaaaacaactggaggaagattcagaatcagctgcaaacagacctttctgttatccctgtcatcaaccgtgcgcagattatccacgactccttcaacctagccagtgctggaaagctatccatcactctgccgctgagcaacaccctcttcctggccagtgaaacagaatacatgccctgggaggctgccctgagcagcctgaactacttcaagctcatgtttgaccgctcggaggtctacggccccatgaagcgctatctgaagaagcaagtcacacccctcttcgcctacttcaaaatcaaaaccaacaactggctcgaccgtcctccaacactgatggagcagtacaacgaaattaatgccatcagcaccgcctgttctagtggtctcgaagagtgtagggatctcgttgttgggctttatagtcagtggatgaacaactctgataataacccgatccaccccaaccttcggtctactgtctactgcaatgccattgctttcggtggtgaggaagagtggaactttgcttgggaacagttccggaaagcaactctggtgaacgaggcagataaactccgctcagccttggcctgtagcaacgaggtgtggattttgaacaggtacctgagttacactctgaaccccgactacatccggaagcaggatgctacctccaccatcgtcagcatcgccaacaacgtggttggacaaactctagtttgggactttgtccgaagcaactggaagaaactgtttgaagattacggcggaggatctttctcctttgccaatctcatccagggagtgacccggcgcttctcctctgagttcgagctgcagcagctggagcagtttaaagaggacaactcggccacaggctttggctccggcactcgggctctggagcaagccctggagaagactaaagccaacatcaagtgggtgaaggagaacaaagacgtggtactcaagtggttcacagaaaacagctagttagtcccgggccgagaaccatctgtcccggcgtgacgcctatgactatctcagcagcctgtgcagggtctctgtcttcagagcgccagacaccggcatctgaccctcaaggtcaaagtctccagcctatggagctagcctagctcctaattgtcagactgccagacacctcccggtccttgcccctcgtgccaactctgccccaggcccaggcctctggggctgatctcagggaagcccagctctgagtctagatttactggacaaagggtagcctagaaagagtctccctgaatgccttactactttccccccacaagacccagaaccaaagaatcaacagggcacaaagatctatatatatttttaagagaaaatgtaaataaagaatttctaaaatgag

SEQ ID NO: 706 - DNA, 5775 bp, Homo sapiens
gcccgggtcccgcctcttcctcagcttggagctgggctccgaaggctgctctgggacagagtctcatactgatgaacggagagcactcaatggccacgcctggagagtcctgcgcaggcctgagggtctggaaccagacagaacaggagcctgtggcctatcacttgctcaacctgtgcttcctgcgagccgccgggagctgggtgccccccatgtacctctgggtccttggccccatctacctcctctacatccatcgccatggctgctgctacctccggatgtcccgcctcttcaaaatcaaaatggtgctcggctttgccctcatccttctctacaccttcaacgcggccgtgcctctctggaggatccaccggggcatgccccaggccccagagcttctcattcaccctaccgtgtggctcaccaccatgagcttcgccaccttcctgatccacatggagagaaagaagggggtccgtgcatctgggttgttgttcgggtactggctgctctgctgcctcgtgccagccatcgacactgtccagcaggcctccgcagggagcttccgccaggagcccctccaccacctggccacctacctgtgcttgtccctggtggtggcagagctggtgctgtcttgtctggtagaccagccacccttcttctcggaagactccaagccattgaatccatgtccagaggccgaggcctcttttccctccaaggccatgttctggtgggcctctggactgctatggaagggctacaggaaactgctggggccaaaagacctctggtcacttgagagagaaaactcttcagaagaacttgtttcccagctggaaagagaatggaggaggaacttcagtgagctgccggggcacaaagggcacagtggtatggggacccccgagacagaggccttcctgcagccagagaggagccagcggggcccgctgctcagggctatctggcgtgtgttccggtccactttcctgctggggaccctcagcctggtcattagcgatgccttcaggtttgctgttcccaagctcctcagtctgtttctggagttcatgggcgacctcgagtcctcggcttggacgggctggctcctggctgtgctgatgttcttgtcggcctgcctacagacactgtttgaacagcagtacatgtacagagtcaaggtcctgcagatgaggctgcgaacagccatcactggcctggtgtacagaaaggtcctggtcctgtccagtggttccagaaagtccagtgcagcaggggacgtggtcaacctggtgtcagtggacgtacagcggctggtcgagagcatcctccacctcaacgggctgtggctgctcttcctgtggatcattgtgtgctttgtctacctgtggcagctccttgggccctctgccctcacagccgttgctgtcttcctgagccttctccccctgaacttcttcattaccaagaagaggagcttccatcaggaagaacagatgaggcagaaggcctcccgagcacggctcaccagctccatgctcagaactgtgagaaccatcaagtcccacggctgggagtgtgccttcctggagcgactcctgcatatccggggccaggagctaggtgccctgaagacctccgccttcctcttctctgtgtctctcgtgtccttccaagtgtctacatttctggtggcgctggttgtgtttgctgtccacaccctggtggcagaggacaacgccatggatgcggagaaggcgtttgtgacgctcacggtgctcagcatccttaacaaagcccaggccttcctccccttctctgtgcactgcctcgttcaggctcgggtgtcctttgaccgcctagctgctttcctgtgcctggaagaagtagaccccaatggcatggtcttgagtccctccagatgctcctcgaaggatcgaatttctatacacaatggcaccttcgcttggtcccaggagagcccgccctgcctgcacgggatcaacctcaccgtgccccagggctgtctgctggctgttgtgggtccagtgggggctggaaagtcctccctgctgtctgccctgcttggggagctgttgaaggtagaagggtctgtgagcattgagggttccgtggcctacgtgcctcaggaggcttgggtccagaatacctctgtggtggagaatgtgtgcttcaggcaggagctggatctgccatggttgcaggaagttctagaagcctgtgccttggggtctgatgtggccagcttccctgcaggagttcacaccccagtaggggagcagggcatgaatctttctgggggccagaagcagcggctgagcttggctcgggctgtgtacagaagggctgctgtgtacctgatggatgaccccctagcagccctggatgcgcatgtcagccaggaagtcttcaaacaggtcattggccccagtggacttctccaaggtacgactcggatccttgtaacacacacgctgcatgtcctgccccaagctgaccagatcctggtgctggccaatgggaccatcgcagagatgggctcctaccaagaccttctgcataggaacggagccctggtgggtcttctggatggagccagacagcctgcaggcgaaggagaaggagaagcacatgctgcagccaccagtgatgaccttggaggcttttctggaggtgggacgcccacgcgcagaccagagaggcccagacccagtgacgcagcccctgtgaagggcagtacttcagaggcacagatggagccttctctggatgacgttgaggtcactggactgacagcaggagaggacagtgtgcagtatggccgggtgaagagcgccacatacctgagctacctgcgggcggtgggcacaccgctctgcacctacaccctgttcctcttcctctgccagcaagtggcgtccttctgccaaggctactggctgagcctctgggccgacgacccggtcgtggatgggaagcagatgcattcagccctgcgtggctccatctttggactccttggctgtctgcaagccatcggactgtttgcctccatggctgcggtgttcctgggtggagcccgagcttcatgcctgcttttccggagcctcctctgggacgtggctcgctctcccattggcttctttgagcgcacaccagtcgggaacctgctgaaccgtttttccaaggagacggacatagtggatgtggacatcccagacaagatgaggaccctgctgacctatgcctttggactcctggaggttggcctggcagtgtcgatggccacaccactggctattgtggccatcctacctcttatgctcctttatgctgggtttcagagcctctacgtggccacatgttgccagctgagacgcctggagtcggccagttactcctcagtgtgttcccatctggctgagaccttccagggcagtcaggtggtcagggccttccaggcccaggggcccttcacagctcagcacgatgccctcatggatgagaaccagaggatcagtttcccgaggctggtggctgacaggtggctggctgccaacctggagctcctggggaatggcctggtgtttgtggccgctacatgtgctgtgctgagcaaggctcacctgagtgctggcctcgcgggcttctcggtttctgctgccctccaggtaacacagactctgcagtgggtggtccgcagctggacagatctggagaacagcatggtggccgtggagcgagtacaggactacgttcacacccccaaggaggctccctggaggctgccctcctctgcagcccagcctctctggccctgtgggggacagattgagttccgagactttgggctcagacaccgaccagagctgcccatggctgtgcagggtgtgtccctgaagatccatgcaggggagaaggtgggcatcgtgggcaggacaggggccgggaagtcctccctgacttggggcctgctgcggcttcaggaggccactgagggtggtatttggatcgatggggtccccatcaccgacatggggctgcacacactgcggtccagaatcaccatcatccctcaggaccctgtcctgttcccgggctcgctgcggatgaacctggacctgcttcaggagaacacagatgagggcatctgggcagcgctggagacggtgcagctcaaggccttcgtgaccagcctgcctggccagctgcagtatgagtgctcaggccagggagatgacctgagtgtgggtcagaagcagctcctgtgtctggcacgtgcccttctccggaaaacccagatcctcatcctggatgaagccactgcctccgtggacccagggacggagatacagatgcaggcggccctcgagcgctggtttgcacagtgtacagtgctgctcattgctcaccgcctgcgctccgtgatgaactgcgccagggttctagtcatggatgaggggcaggtggcagagagtggcagtccagcacagctgctggcccagaaaggcctgttttacaggctagcccaggagtcgggcctagcctgagtcaggactcttcccaaacctcctggagccagccacagagcctgcagtagctggagatgccagagactcaggggccacatgatgcccaatctaaactcctttttgggaggaagatagcagagagagtgacagagtattggaataccagacccagaagaacccagcatgcccaggttggcttgagcaaggccacacccaccccaggccaaaaagaacagtgactctcagcccaagctgtctacttcaaggccatacccaccccaggccattcaggttggatgccctggaccggggtgatggcgtgcacatatcccctaactccttattttgaggtcattgtagagttcactcacagttttaagaagccacatggagagaagccgcaaaccctctgccctgtttattccgggggtgacaccttgtccaaccctaggacaagatgaagcatcacactgactccgactgacttgtctttacctctgctgcgtgtgcatcagtgtttggactccgtgctttgtgctctcattggtttttgagacaggatttcacatagcccaggctggccctgaactcactttgttgctgaggatggccttgaacatctgatgctcctgccttccctcccaagtgctgggattatggcctgtgtcaccacgccctgtgtgggggtctcaaacaaggctttgtgtgtgcttgacaggcactcactctaaaaactgtgttacagccccggctctggattcggttctactcctgtttaaaattgtagtggtgaagggtctcttgctcaaactggcctcaaactcgagatgctcctgtctcggtctccagagtgctggaatgacagacgtgtgccactacacctgccttgactcaccacagctaagtagtgacatccccatgggccagggctggtgagtcccgtgcgtgacagtgtgctgagcagtacccttcgcttctgctcagagatgcccttctaaagctgtggcaaagagatttccacacactgccgtgcccccccaggactgcatcatgaattgatccgccctaatagcacccatgactccctgagcagtgatatgttgggttcaggagaggattcctgcttgcttcttggacagggcttgctcttccctcgaccctgaggcttctctgattggctacccttaataaaggatttacgggatttcctttc

SEQ ID NO: 707 - DNA, 2185 bp, Homo sapiens
gagagcttcccgcagagggccggcggtgggagcggagtgggtcgggcggggccgagccgggccgtgggccgtgtgggggccaggccgggccggcggacggcaggatgggctgcaccgtgagcgccgaggacaaggcggcagccgagcgctctaagatgatcgacaagaacctgcgggaggacggcgagaaggcggcacgggaggtgaagttgcttctgttaggtgctggagaatcagggaagagcaccatcgtcaagcagatgaagatcatccacgaggatggctactcagaggaggagtgccggcagtaccgtgcggttgtctacagcaacaccatccagtctatcatggccatcgtcaaagccatgggcaacctgcagatcgactttgctgacccccagcgtgcggatgatgccaggcagctgttcgcactgtcctgtgctgccgaggagcaaggcatgcttccggaagacctgtcgggcgtcatccggaggctctgggctgaccatggtgtgcaagcctgctttggccgctcacgggaatatcaactcaatgactcagccgcttactacctgaatgacctggagcgcatagcacagagtgactatatccctacacagcaggatgtgctgcggacccgtgtgaagaccacaggcatcgtcgaaacacacttcaccttcaaggacttacacttcaagatgtttgatgtgggtggtcagcgatctgagcggaagaagtggatccactgctttgagggtgtcacggccatcatcttctgtgtcgccttgagcgcgtacgacttggtgctggctgaggatgaggagatgaatcgcatgcatgagagcatgaagctgtttgatagcatctgcaataataagtggttcacagacacctccatcatcctcttcctcaacaagaaggacctgtttgaagagaagatcacacagagccccctgaccatctgtttccctgagtacacaggggccaacaagtatgacgaggcagccagctacatccagagcaagtttgaggacctgaataaacgcaaagacaccaaggagatctacacgcacttcacatgcgccaccgacaccaagaacgtgcagtttgtgtttgatgccgtcactgacgtcatcatcaagaacaacctgaaggactgtggcctcttctgaggggcagtgggcctggcaggatgggccaccgctgactctgctccccactacctgtgaggaagatgggggcaagaagaccatgctccctgcctgttcccccagctgcttctcccctgtctcttctctctgttctcagctcccctgtcccctccctcggctctagacttgggggaggggttgccacaggcctccctgtctaaaacccacctttgtctgaggtgccgggagtggccatggtacctccttactgggcatccattcgggttttctaaccattgtcttgttctggggtgagcggggagcgcatgcagagtttcccaaggcctatgtctggaggagtaccaattcctccagcctagacccctggctttgtccaacaccagccctgacccaagtccaaatgtttacagggagcctcctgcctaccccactctctgccgcttggaggccccaaaggaaaaagcacaagaagcgtgagagacaccaccattcctggagacaaagcccacctgctcattctcgtagctttaaaaaaaaggaaaaggaaaggagaaaaaaaaaaggaaaactgcaaatctagaaaactttttagagaaacctatttaaaactgtcaggtcctgaccagcatccctccccccgccccccagcccctttccagtgattccgtgccttgagtgtttctgcctgtttacacccatccctctttgggcggccccctgccctgccctccacggaattggattccaagggctgttccagacaactgccaatgtcactgagggccctgccctgaagccctgggcccaggctccattaacctaaatgtagctccttagcgctaatctaggaaccgccgctgcctgctgagggtcaggcccctcacgccctcgccccaggcccgggacctccagcgttgaacacttccttgcttttttcacatgttttatggaattgttcacatgatttgaaataataaaatgtagaaagaaaaaaaaaaaaaaaaaaaaaaaaa

SEQ ID NO: 708 - DNA, 1227 bp, Homo sapiens
cgcggccgccttgaagatggcgtcgaccagccgtttggatgctctcccacgagtcacatgtcccaatcatccagatgcgattttagttgaggactacagagctggcgacatgatctgtcccgaatgcggcctagttgtaggggaccgggttattgatgtggggtctgaatggagaactttcagcaatgacaaagcaacgaaagacccatctcgagttggagactctcagaatcctcttctgagtgatggagatttgtccaccatgattggcaagggtacaggagcggcaagttttgatgaatttggcaattctaagtatcagaaccggagaacaatgagcagctctgatagagctatgatgaacgcattcaaggagatcacgaccatggcagacagaatcaacctcccacgcaatatagttgatcgaacaaataatttattcaagcaagtatatgagcagaagagcctgaagggaagagctaatgatgcgatagcttctgcttgtctgtacatcgcttgtagacaagaaggcgttcccaggacatttaaagaaatatgtgctgtgtctcgaatctctaagaaagaaattggccgttgttttaaactgattttgaaagctttggagacgagcgtggatctgatcacaactggggacttcatgtccaggttctgctccaacctttgcctccccaagcaagtgcagatggcagctacacacatagcccgcaaggctgtggagctggacttggttcctggcaggagtcctatctctgtggcggcagcagctatttacatggcctcccaggcttcagctgagaagcgaacacagaaagaaatcggggatattgctggtgttgctgatgttacaatccgacagtcctacagactgatctaccctcgggctccagatctcttcccttcagacttcaagtttgacaccccagtggacaaattaccccagctataagctgaggcaactaagtgtcacactcttaatgtacatggaactttgtgcatagccacacagtgctggttgagcctttaatgaggaaaaaggagatggtacgcattccacagctaagtattattgcttagtcttctgtatgtatatagtagtgcgacatatttaatgacttaaatttcttactgattctgctttcttttttagtgatctaggaaacagtattttggaagatattaaaatatgtaattctcaaataaaatttt

SEQ ID NO: 709 - DNA, 551 bp, Homo sapiens
gggtcacgtagtcaggtcccagacttgggtcacaccgcacttaacaccgtcctccggccgtcgttcgcagtctctccgccaccatgcctatgttcatcgtgaacaccaatgttccccgcgcctccgtgccagaggggtttctctccgagctcacccagcagctggcgcaggccaccggcaagccggcacagtacatcgcagtgcacgtggtcccggaccagctcatgacttttagtggcacgagcgacccctgcgccctctgcagcctgcacagcatcggcaagatcggtggcgcccagaaccgcaactacagcaagctgctgtgcggcctgctgtccgatcgcctgcacatcagcccggaccgggtctacatcaactattacgacatgaacgcagccaacgtgggctggaacggttccaccttcgcttgagcccgggcctcacttacctgcaccgctgttcttcgagtcttgctgcacgccccgttctgtgtttatccacccgtaatgatggccaccttccggtcgggagaaataaatggtttgagacca

SEQ ID NO: 710 - DNA, 2337 bp, Homo sapiens
cgtctgcaacgcgagtgcccagcgcaacgtgctaccttggaaacgcagggcctctcttcctgagcgtggcagagcggggtcccgaggatgctgctggcagccgggacgcggtatgcctaccggctgtgcggccggcgagccgcggcggctctgcagggacgcgcaggccggagctgcgcccggagcgtcagcactagctggtccccggtgggcgctgcctttaacgtcaagccccagggccacctgtgggacctgttgggagagcgacggggtctttttggagttcctgagctcagcacccctgaaggattccaagttgcccaggaggaagccttgaggaagacggagtggctggtagagcgagcatgttccacacctccagggccacagacagtcctcattttcgatgagctctcggattgcctctgcagagtggctgacttggcggactttgtgaaaattggacacccagagcaggcgttcagagaggctgcgcaggaggcctgcagaagtattggcaccatggtggaaaagttgaatacgaatgtggaattgtatcagagtctgcagaaattactagatgacaagaagcttatggattcccttgatgcagaaaccaggcgagtagccgaactatttatgtttgattttgaaatcagtggaatccatctagatgaagaaaagcgcagaagagccgtggacctcaatgttaagatcttggacttgagtagtgctttcctcatgggaaccaactttcccatcaagatccagaagcatctcttaccagagcacattcagcaccactttgctcgtgatggaaggcatttagtcatcgatggtctacatgcggaagcctccgatgacctggttcgggaggctgcttataaaatttttctttatcccaatgctgatcagttgaagtgtttggaggagttgctaagcagccgagatcttctggcaaacctagtaggctatctaccttttcccacaggccctccaggaaccatagcccagactccagagactgtcatgcagttccttgagaagctatctgaaaagctctgcgaaagaactagaaaagattttgagatgatgcaaggaatgaaaacaaaactaaatcctcaaaattctgaactaatgccttgggaccctccctactacagtggtgtgattcgtgcagagaggtataatattgagcccagtttatattgtccattcttatcccttggagcttgcatggaaggcctgaatgtcctatttaacagactgttgggcgtcaccttatatgcagaacagcccttcaaaggagaggtgtggtgtattgatgtccggaagctggctgttgttcatgaatctgaagggttgctgggctacatttactgtgattttttccagcgagcaaacaagccacagcaggattgccacttcaccatccgagggggcagattaaaggaagatggcagctatcagctcccagttgtggttctcatgctgaatctccctcatgcttccagggatttccctaccttattaactcctgggatgatggaaaatctcttccatgaaatggggcatgccatgcactcaatgctcggacgaactcggtaccagcatgtcactgggaccaggtgccctactgactttgctgaagttccgtctattctgatggagtatttttcaaatgattaccgagtagtcagccagtttgccaagcattatcagactggtcagccactgccaaaagctatggtgtctcgtctctgtgaatctaagaaggtctgtgccgccgcagaaatgcagctgcaggtcttttatgccgccctggatcaaatctaccatggccagcatcccctgaagaagtcaaccacagacatcctcatggaaacacaagagcagttttatggcttaccctatgttcctgacactgcctggcagctgaggttcagccacctggtgggatatggcgccaagtattactcatacctgatgtccagggctgtggcatccatggtctggaaggagtgcttcctacaggatccctttaacagggccgccggggagcgctaccgcagagagatgttagcccacggtgggggcaaggaacctatgctcatgattcaaggcatgctgcagaaatgtccttccatcgatgattttgtggatgcccttgtgtctgacttgaatctggactttgaaactttcttcatggattctaaatagcagaagcctggctcacgtggataggaaactcgttaccagatcctacagttatgaagccttcactccaacttcagtgttcactgaggaagaaatactttctgacaagccttaaattga

SEQ ID NO: 711 - DNA, 1705 bp, Homo sapiens
gccggtgctgggctctgtagctcggtactccagcctctcgtcatggcctcggaaaagcctcaggacctaatggtcacctgcaccgcgccggtcaacatcgcggttatcaaatactggggaaagcgggatgaagcgctgatcctgcccatcaacccctccctgagcgtcacgctgcaccaggaccagctaaaaaccaccacaactgcggccattagcaaggacttcacagaggaccgcatctggctgaacggtcgtgaggaggacgtggggcagccacggctccaggcctgcctgagagagattcgccgcctggctcggaagcggaggagcacgggagacggggatgccctgcccctcagcctcggctataaggtgcacgtggcgtcagtgaacaacttccccaccgctgcaggcctggcttcctcagcagccggctacgcctgcctagcctataccttggcccgggtctacggggttgagggagacctctcagaagtggcccggcggggctcaggcagcgcatgccgcagcctctacgggggcttcgtggagtggcagatgggggaacaggccgatgggaaggacagcatcgcccggcagatagccccagagtggcactggccccagctccgagttcttatccttgtggtgagtgcagagaagaagccgacgggcagcacagtgggcatgcagaccagcgtggcgaccagtaccctgctcaagttccgggctgagtccattgtgcctgagcgcatgaaggagatgacccgttgcatccaagagcaggacttccaggccttcgcccagctgaccatgaaggacagcaaccagtttcacgccacctgcctcgacaccttcccgcccatctcctacctcaatgacacctccaggcgcatcatccagctagtccaccgcttcaacgcccaccatgggcagacgaaggtggcgtacacatttgatgcgggccccaatgctgtgatcttcactctggaggacaccgtggccgagtttgtggcggcagtaaggcacagcttcccccctgctgcgaatggagacaagtttctcaaggggctgcaggtggcacccgttcttctctccgatgagctgaaaacttcgctggctacggagcccagccctggtggggttcagtacatcattgccactcaggtgggaccaggacctcaagtcctagacgaccctcaccatcatctgctaggcccggatggcctgccacagcgggacctttgatctctcccatgtgcatctggagaaaggggttgctcccgggagctcgggagctcctgtgctgatgggccacgtccaaaggcttgcttgatgacacctaggggtgtctcctgtgatgagcagctgtctgggcagccggggacccctctcaagtgcctcaccttcctgctggctagccgaccttagggaagaggagtcggcgtctctcccaccgaagatgcccccgagggcctctaagcgtgaaggatgagggctcagacagcagtgcctctgttgagactcaggccacagtttctttgagaagcctcctggtgagggtaggggctgtggaacccacaggtagggtccattgtgggtgtggatgtaccacgaaggtgcagttgatggacccgatgaccacaggaataaagtgtgccactgctgcctgccaaaaaaaaaaaaaaaaaaaaaaaaaaaaacc

SEQ ID NO: 712 - DNA, 710 bp, Homo sapiens
cttttccggttcccgcagccgcagccatgagcagcaaagtttcacgcgacaccctctacgaggcggtgcgggaagtcctgcacgggaaccagcgtaagcgccgcaagtttctggagacggtggagctgcagatcagcctgaagaactacgaccctcagaaggacaaacgcttctcgggcaccgtcaggcttaagtccacccctcgccccaagttctccgtgtgcgtcctgggggaccagcagcactgtgatgaagccaaggccgtggatatcccccacatggacatcgaggcgctcaagaagcttaacaagaacaagaagttggtcaaaaagctggccaagaagtatgatgcctttttggcctccgagtctctgatcaagcaaatcccacgtatcctgggcccaggcctaaacaaggcgggcaagttcccctccctgctgacacacaatgaaaacatggtggccaaagtggatgaggtgaaatccacaatcaagttccagatgaagaaggtgctgtgtctggccgttgccgtcggccacgtgaagatgaccgatgacgagctagtctacaacatccacctggctgtcaacttcttggtgtccttactcaagaaaaactggcagaacgtccgggctctgtacatcaagagcaccatgggcaagccccagcgtctgtattaggacgctccaataaacctcgttgctgccttc

SEQ ID NO: 713 - DNA, 366 bp, Homo sapiens
ttccggtctctttggcctcgccggtagaagcaagatgacgaaaggaacgtcatcctttggaaagcgtcgcaataagacgcacacgctgtgccgccgctgtggctccaaggcctaccaccttcagaagtcgacctgtggcaaatgtggctaccctgccaagcgcaagagaaagtataactggagtgccaaggctaagaggcgaaacactaccgggactggtcggatgaggcacctaaagatcgtctaccgaagattcagacatggattccgtgaaggaacaacacctaaacccaagagggcagctgttgcagcatccagttcatcttgaggatttcaatcggtcataaaataaatcttctggtttca

SEQ ID NO: 714 - DNA, 610 bp, Homo sapiens
ggggggggggggggggagcctccgcctcggaccctgtagccgccgcgatgttgatgcccaagaagaaccggattgccatctatgaactcctttttaaggaaggggtgatggttgccaaaaaagacgtccacatgcccaaacaccccgagctggcagacaagaacgttcccaaccttcacgtcatgaaggccatgcagtctctcaagtctcgaggctacgtgaaggagcagtttgcttggagacatttctactggtacctcacgaatgagggcatccagtacctccgagattacctgcacctacctccggagatcgtgcccgccaccctgcgccgcagccgtcccgagactggcaggcctcggcccaaaggtccagagggtgagcggcctgcaagattcacaagaggggaggcagacagagacacctacagaaggagcgctgtgccccctggagctgacaagaaagctgaggctggggctggctcggcaacggagttccagtttagagggggtttcggtcgtggacgtggtcagccacctcagtgaagttggagattatgttgtgttgaataaactttaaaaaaaaaaaaaaaaaaccccccccccccccc

SEQ ID NO: 715 - DNA, 534 bp, Homo sapiens
agatggcggacattcagacggagcgtgcttaccaaaagcagcctacaatctttcaaaacaagaaacgtgttttgctgggagaaactggcaaggaaaaactccctcggtactacaaaaacatcggtctaggcttcaagacgcccaaggaggccatcgagggcacctacatagacaagaaatgccccttcactggtaatgtctccatccgaggacggatcctgtctggtgttgtgacgaagatgaagatgcagaggaccattgtcatccgccgggactatctccattatatccgaaagtacaaccgctttgagaagcgtcacaagaacatgtctgtgcacctgtccccctgtttcagggacgtccagattggcgacattgtcactgttggagagtgcaggcctctgagcaagactgttcgattcaatgtgctcaaggtcaccaaggctgctggcaccaagaagcagttccagaagttctgaggggggactgtagccaatgctctagaacaaataaaagttattttccaacttacag

SEQ ID NO: 716 - DNA, 359 bp, Homo sapiens
tttctgtgttctccgtagacccgtgagcagggacggcctcggtatgcagaacgacgccggcgagtttgtggacctgtacgtgccgcggaaatgctccgcgagcaaccgcatcattgctgccaaggaccacgcgtccatccagatgaatgtggccgaggttgacaggagtacaggccgatttaatggtcagtttaaaacctacggcatctgcggggccattcgcaggatgggcgagtcagatgattctattctccgattggctaaggctgatggaattgtctcaaagaacttttgagccagaagaaatcgggaataatttgttataaataaaagtgataataagtaaaaaaaaaaaaaaa

SEQ ID NO: 717 - DNA, 552 bp, Homo sapiens
  misc_feature (552)..(552): n is a, c, g, or t
cttcctttccgatccgccatcgttggtggagcagccgccacgatgcagatttttgtgaagacccttacagggaagaccatcacgctcgaggttgaaccctcggacactatagaaaatgtaaaggccaagatccaggataaggaaggaattcctcctgatcagcagaggttgatctttgctggtaagcagttggaagatggccgtactttgtctgactacaacattcaaaaggagtccactctccatctcgtgctgagacttcgtggtggcgctaagaaaaggaagaagaagtcttacaccaccccaaagaagaacaagcataagagaaagaaggtcaagttggctgtgctgaaatactataaggtggatgaaaatggcaaaatcagccgacttcgtcgggaatgtccttctgatgaatgtggtgctggagttttcatgggtagccactttgacaggcattactgtggcaagtgttgtctgacttactgcttcaacaaaccagaagacaagtagttgtgtatgagttaataaagagaaggaactgatgttaan

SEQ ID NO: 718 - DNA, 573 bp, Homo sapiens
aagactgcagcgcctcagggcccaggtttcaacagattcttcaaaatgccatcccaaatggagcatgccatggaaaccatgatgcttacatttcacaggtttgcaggggaaaaaaactacttgacaaaggaggacctgagagtgctcatggaaagggagttccctgggtttttggaaaatcaaaaggaccctctggctgtggacaaaataatgaaagacctggaccagtgccgagatggaaaagtgggcttccagagctttctatcactagtggcggggctcatcattgcatgcaatgactattttgtagtacacatgaagcagaagaagtaggccaactggagccctggtacccacaccttgatgcgtcctctcccatggggtcaactgaggaatctgccccactgcttcctgtgagcagatcaggacccttaggaaatgtgcaaataacatccaactccaattcgacaagcagagaaagaaaagttaatccaatgacagaggagctttcgagttttatattgtttgcatccggttgccctcaataaagaaagtctttttttttaagttccg

SEQ ID NO: 719 - DNA, 2184 bp, Homo sapiens
tccagctaggtctgccacaatgctgcctcggctatacagatctgtggctgtggggcttccgcgggccatcagagccaagtcaacccccttgagactctgcattcaagcatgttcctcaagtgactcacttaagccgcagcatcccagcctcaccttttctgatgataactcaaggactcggggatggaaagtcatggggaccctgataggccttggtgccgtgctggcctatcatgaccatcggtgtagggcttctcaggagtcaccacggatatactctaaagaggatgtgcgttctcacaacaaccttaaaactggagtctgggtaactctaggctctgaggtctttgatgtcacaaaatttgtggacctgcatccaggaggacaatcaaaactgatgctagctgctggaggtcccctagaacccttctgggccctctatgctgttcacaaccagccccatgtacgtgagttactggctgagtataagattggggagctgaaccccgaagatagaatgtcccctcccttggaggcctctgacccttattccaatgaccctatgcgtcatccagccctgaggattaatagccagcgcccctttaatgcagagcctcctcctgaactgcttacagaaagctacatcacaccaaaccctattttctttacccggaaccatctgcctgtacctaacctggacccagacacctatcgcttgcatgtagtaggggcacctggaggtcagtcgctctctctctccttggatgatttgcataagttccccaaacatgaggtcactgtcactctgcagtgtgctggtaaccggcgctcggagatgaataaggtcaaggaagtgaaaggtctggagtggagaacaggggccatcagcacggcacgctgggccggggcacggctctgtgatgtcttagcccaggctggtcaccgactccgtgaaaccgaggcccatgtctgttttgaaggactggattcagaccccactggaactgcctatggggcatccatccctctggctcgggccatggatccccaagccgaggtcctcctggcttatgagatgaatggtcagcctctgcctcgtgaccatggcttccccgtaagggtggtggttcctggtgtggtaggtgctcgccatgtcaagtggttgggcagagtgagtgtggagtcagaggaaagttatagtcactggcagaggcgggattacaaaggcttttctccatctgtggactgggacactgtagactttgatctagccccatcaattcaggaactacccatccagtcagctatcacacagcctcaagatgggacgactgtagaatcaggagaggtgattatcaagggctatgcatggagtggtggtggtagggctgtgattcgagtggatgtgtctatggatggtggactgacctggcaggaagctgagctggagggagaggaacagcatcccaggaaggcctgggcttggcgaatatggcagttgaaagctcacgtgccagctgagcagaaggaattgaacatcatttgtaaagcggtagatgacagttacaacgtgcagccagacactgtggccccaatctggaaccttcgaggcgtgctcagcaatgcctggcaccgtgtccacgttcaggtggttccatgaaagcatggaacagcagtttgtacccaaaggacccccacacctctttaccaacccagccttaatcctcggtgccatagataaacgtttccttcctctactgaggggagaaagcagctctgaagacatcactttcttaccctaccatacctttacttctcatgcctcccctcaggccttgttttgcattgcttagattcttcagatatgtgtgtgatgtatggaatgtgtaaaaactgtacgttatttctttttcttcttcatcatcttgttttttttcccttcaagacagggtttctctgtgtagccctggctgtcctggaactcactttgtagaccaaactgcctgccttagtctccagaatcgggggattaaaggcatgtgccgccactgcccgtctacaactttcaatcgcctctgggatgcaaggagatttccctcttagagtgcttttaaaacgattccaataaagtgtctgtttaagactatgactggaaaaaaaaaaaaaaaaaaaaaaaaaaaaaaa

SEQ ID NO: 720 - DNA, 3115 bp, Homo sapiens
ggagggaacacggtgcctcgggttgtgtacacgctccactgacagagcttcttgcagccgggcagccgctgatcacgcgtggccccgccagcccattggctgaggcctcacacacctttgccgctgattggtcgataccacgccccgccttccaccccgcccgcggcgcggggcaggcagagcggctacctgcatggggagggggggcagacagcgcggagcgcggtggcgtcgacgtctagtgtctcagtgctccgtctgtggctaggcagccagcagccaagcagctcgcgacctacggccaggcagccaaccatgcttaacttcggcgcttctctccagcaagcttcggaggggaaaatggaactaatttctgaaaagtccaaagagggagcacatccctgggacaaagctgaacagagtgactttgaagctgtggaagcgctcatgtccatgagctgcgactggaagtctcacttcaagaaataccttgaaaacaggcctgtcacaccagtgtctgatacctcagaggaagacagtttgcttccagggacgcctgaccttcagaccgtcccagcattctgtttgactccaccttacagcccctctgacttcgaaccctcgcaggggtcaaatctgacggcaccagcgccacctactggtcacttcagatcgctctccgatgctgccaagcctcccagcatcgctccttttaaagaggaggaaaagagcccattagctgcccctcccctccctaaggctcaagccaccagtgtcatccgtcacacagctgatgcccaactctgtaaccaccagtcctgccctgtgaaagcagctagcatcctcaactaccaggacaattctttccggagaagaacccacataaatgtcgaggctactcgaaagaacataccctgtgctgctgtgtcaccaaacagacccaagcctgagcccagcacagcggcgaatggcgctgagaaggccggcactgcgccgtatgactttgctgtgccttcctcagagacagtcatctgtaggtcttctcagccagctcccacgtccccagtacagaagtcagtactgatgtcttcacctacagtgtccactgggggagtgccacccttgcctgtcatctgccagatggttccccttccagcaaacaactctctcgttaccacagttgtccccagcagtccgcccagccagccacccgctgtctgctcacccgtgttgttcatgggcactcaggtgcccaagggcacggtcatgtttgtggtaccccagcccgttgtacagagcccaaagcctccagtggtgagccccaatggcaccagactgtctcccattgcccctgcgcctggattctctccttcagcagcaagggttactccccagattgattcgtccagagtaagaagtcacatctgtagccacccaggatgtggcaagacttactttaaaagttcccatctgaaggcccacgtgagaacacacacaggggaaaaacctttcagctgcagctggaaaggctgtgaaaggaggtttgctcgttccgatgaactgtccagacaccggcggacacacacaggtgagaagaaatttgcctgtcccatgtgtgaccgtcggttcatgagaagtgaccatttaaccaaacatgcccggcgacacctatcagccaagaagctgccaaactggcaaatggaagtgagcaagttaaatgacatcgctctgcctccggccacagcgtcggcacagtgacggccagaagatggagactcagaataaactttggtcagagtcgagccggtgaccgtgtcaaatgcttctgcaagtctgcggccctccaacagggcctaaagcagaagcccctggcctggggggaggcccagcctgggttagatgacgagaagtgcttcagccacaggcagttcacagaagggcggggttcatttcttaccacgtagagagatgagaacactcgtgtcccttgagtagttttggaaggtttcggatgagatgagcacagcacaggttttgaatcacatacacatcaggtactttgtttttgccatttatacttgagaccagctttgcagtgtgattcttttaaagcgttggtttcgagaatatagaggctgaaattacggtacagaaatgcagctagaaagtgagtttgtgtcatcttctcctagagttatcttgcttattattcctagtctttacagtcaactccgtggacgtggctaagtatagaaaactatcatttcttccactgttgttggtatttgaggttgaacagctgtacattgctaaggggagcccaaggattggaactctcattaatttaattgcttggaagtgcagctaaagttcttttttttggccttttgttttgaaagtttaggcattttactctaccttagatattagtttgcttgcagttttttgtgtagatttgaaaactgtacaccaatgtgtttcctatagacttaagatacgctgcgctttgtttagaaaacaatctggcagtgaaaatatgtgtcgtaaagaagagatgtcaagaatttgagatgactccttgagaaagatggcttatgtcatcagcaaaggacacttacgtcagacgtacactgtttctatcaaatcaggaagttagtgaccatcacagatggacaggtgtccttttatttataggagtttgtcaggatgtctgagtagataggtaggaaattgttactagaacattcacttccgacttgacaaggatattcatggtgcagatacgttcttcctgccgctgcagtgtctgggtgtccgggaaactccgagactttaaagtgtcataatgtggtcacacctgcagttctggggatccagagccttgcttgtgttctgtaagctctgtcaccgagttgtatccccacctgaaagcagtgacttttgctaacagtatttctgttctgttgtaaagtggatagaagacacacttggtagtaaaggtaaattattcaaagtccacagtgaaaaactcaccataccttcccatttaaaccgtttctgtatctcataggtttctgacatgcaaacttgaacccttgaaaaaaagagttttctt

SEQ ID NO: 721 - DNA, 1737 bp, Homo sapiens
  misc_feature (1666)..(1666): n is a, c, g, or t
ggggcagctgcggagcatgtcgaccccggcccgtaggaggctcatgcgggatttcaagcgattgcaagaggacccacctgtgggggtcagtggtgcaccatctgaaaacaacatcatgcagtggaacgcagttatatttggaccagaagggacaccctttgaagatggtacttttaaactagtaatagaattttctgaagaatatccaaataaaccaccaaccgttaggtttttatccaaaatgtttcatccaaatgtgtatgctgacggcagcatatgcttagacatcctgcagaaccgatggagccccacgtacgacgtctcctccatcttaacttcaattcagtctctgttggatgagccgaatccaaacagtccggccaatagccaagcagcacagctttatcaggaaaacaaacgggagtatgagaagagggtttcggccattgttgagcagagctggaatgactcataatagacacctggtctgtccacctttccatcgtcgttgtgtataatttacctcccagtaggaaggctagcaagttttaagtgccacgggttttaaggattctgcagagaaaaaagaaaaagtccttcagtttagaacctacaaaagcttgtgtatcttgattaatgtactttttattgcatggtgtgaactaagttattgctgcataaatttgtaatatatcctgtttgtatttttttccaagtgtataatgttggtgtggagttttcatgacagaatatacacattttgtaaatctgtacttttttcaaatattgaatgccttatttttgaattctttagatttttaaattggagaaaagcacttaaagttttttatatatgaatattacatgtaaagctgttaaaatacataacttcagtgcaaaaaaacaggcatctggactcaatggtacctgattaagcccattcctctcagacacttggatgggagacccacacctggactcttttgagcttcagttgatggaattagtgcagcttgagtcagctcaacggggtctctgtgacttgtcctccttcttctgagaccttgcctgtgaaagtattcaaaacacctgcagtattgcctttagcgagttctcatagcaaaggacatagggtgggtgggactggattcgcaggtgaaattaaacctgacagggccgtgtgtttgcattttaatttgatatactcctgaacagtccatctctgacatgctctgccacaacccttctgtgtgtttccttagttactgctaccaaatatccgtgcagccctgcattactgtttccctgggtaccgctcatccccagcccctgaaagccccctggaggtggggaagctgtccccgttgcattcatcttacacacttgcaggctagcgcatgccacacgctctattagtactggtggcttgagtaaataagcaagttcacagctatcgccctctgcagtgcttcaaacactaatgtcttctaacaaatacaactttagtgatcactttgatgccattgaacatgaaacaggtttcttgttgatactagaagatatgtcagaggactcattcaagcctcttctcctgtttttttcgtgacacacatcgataagaagctgattttttttagactaaaatgcataacttaaaatatcttgngaattttttttaaaaggaagggatagaaaaaatatgtcatgaagaaggagaaaaaaaaaaaaaaaaaaaaa

SEQ ID NO: 722 - DNA, 1796 bp, Homo sapiens
gttcacagccactgcgccctcgctctcttcttgcagatcttgcagccgcagcaagccaggccacctcgtccttcgaagccatgtccaccaggtccgtgtcctcgtcctcctaccgcaggatgttcggtggctccggcacatcgagccggcccagctccaaccggagctatgtgaccacatccacccgcacctacagcctaggcagcgcgctgcgccccagcactagccgcagcctctattcctcgtccccgggtggcgcctatgtgacccggtcctccgccgtgcgcctgcggagcagcatgcccggcgtgcggctgctgcaggactccgtggacttctcgctggccgacgccatcaacaccgagttcaagaacacccgcaccaacgagaaggtggaattgcaggagctgaatgaccgcttcgccaactacatcgacaaggtgcgcttcctcgagcagcagaacaaaatcctgctggccgagctcgagcagcttaagggccagggcaagtcgcgcctgggcgacctctacgaggaggagatgagggagttgcgccggcaggtggatcagctcaccaatgacaaggcccgtgtcgaggtggagagggacaacctggccgaggacatcatgcggctgcgagaaaaattgcaggaggagatgctccagagggaggaagccgagagcaccctgcagtcattcagacaggatgttgacaatgcttctctggcacgtcttgaccttgaacgtaaagtggaatccttgcaggaagaaattgcctttttgaagaagctgcacgatgaagagatccaggagctgcaggcccagattcaggaacagcatgtccagatcgatgtggacgtttccaagcctgacctcaccgctgccctgcgtgatgtccgccagcagtatgaaagtgtggctgccaagaacctccaggaggccgaggaatggtacaagtccaagtttgctgacctctctgaggctgccaaccggaacaacgatgccctgcgccaggcaaagcaggagtcaaacgaataccggagacaggtgcagtcactcacctgcgaagtggatgcccttaaaggcactaatgagtccctggagcgccagatgcgtgaaatggaagagaattttgcccttgaagctgctaactaccaggacactattggccgcctgcaggatgagatccagaacatgaaggaagagatggctcgccaccttcgtgaataccaggacctgctcaatgtaaagatggctcttgacattgagatcgccacctacaggaagctgctggaaggggaggagagcaggatttctctgcctcttccaaacttttcttccctgaacctgagagaaactaacctggagtcacttcctctggttgacacccactccaaaagaacactcctgattaagacggttgaaaccagagacggacaggtgatcaatgagacttctcagcaccacgatgaccttgaataaaaactgcacaggctcagtgcaacggcgcagtaccagcaagaaggaaaaaaaaatcgtatcttagaaaaaagagctttcaagtgcctttactgcagttttcaggagcgcaagatagatctgggatagaaacgagctcagcacataacaactgacacccccaaaaggcgtagaaaaggtttacaaaataatctagttttacgaagaaatcttgtgctagaatactttttaaagtatttttgaataccattaaaactgctttctttttccagaaaatatctgaccaacttgttactgcttcaataaaacttcagaaat

SEQ ID NO: 723 - DNA, 1288 bp, Homo sapiens
gccgaaagagggaagatggcgcttgatgggccagagcagatggaactggaagaggggaaggcaggcagtggactccgtcaatattatctgtccaagattgaagaactccagttgattgtgaatgacaagagtcagaacctccggagactgcaggcccagaggaatgagctcaatgcaaaagttcgtctgttgcgggaggaactgcagctgctgcaggaacagggctcctacgttggagaagtcgtgagggccatggataagaaaaaagtgttggtcaaggtccatcctgagggcaaatttgttgttgatgtggacaagaacattgatatcaatgatgtgacacccaattgtcgggtggctctaagaaatgacagctacactctgcataagatcctgcctaacaaagtggaccctttggtatcactaatgatggtggaaaaggtgccagactcaacctacgagatgattggcgggctagacaagcagatcaaggagatcaaagaagtgattgagctgcctgtgaagcaccctgagctctttgaagccctgggcattgcacagccaaagggagtcctgctatatggacccccgggcactgggaagacgttgttggcccgggctgtggctcatcatacggactgtacctttattcgtgtctctggctctgaactggtacagaaattcattggggaaggggcaagaatggtgagggagctgtttgtcatggcccgagaacatgctccctccatcatcttcatggacgagatcgactctatcggttcttcacggctggagggaggctctggaggcgacagtgaggtacagcgcacaatgctggaactgctcaaccagctggatggctttgaggccactaagaatatcaaggttatcatggctactaataggattgatatcctggactctgccctgcttcgtcctgggaggattgacaggaaaattgaattcccacctcccaatgaggaggcccggctggacattttgaaaatccactctcggaaaatgaacttgaccagggggatcaacctgaggaaaattgctgagttgatgccaggagcttcaggggctgaagtgaagggcgtgtgcacagaggccggcatgtatgctctgcgggaacggcgtgtccacgttactcaggaggactttgagatggcagtagccaaggtcatgcaaaaggatagtgagaaaaacatgtccatcaagaagctttggaagtgagggtgtgtcctttgtgtggatccctcaaataaaggtctgtgcgataaactcc

SEQ ID NO: 724 - DNA, 1208 bp, Homo sapiens
cgttcagaccccagcaccatgcccatgacactgggttactgggacatccgtgggctagcgcatgccatccgcctgctcctggaatacacagactcgagctatgaggagaagagatacaccatgggagacgctcccgactttgacagaagccagtggctgaatgagaagttcaaactgggcctggacttccccaatctgccctacttaattgatgggtcacacaagatcacccagagcaatgccatcctgcgctatcttggccgcaagcacaacctgtgtggggagacagaagaggagaggattcgtgtggacattctggagaatcagctcatggacaaccgcatggtgctggcgagactttgctataaccctgactttgagaagctgaagccagggtacctggagcaactgcctggaatgatgcggctttactccgagttcctgggcaagcggccatggtttgcaggggacaagatcacctttgtggatttcattgcttacgatgttcttgagaggaaccaagtgtttgaggccacgtgcctggacgcgttcccaaacctgaaggatttcatagcgcgctttgagggcctgaagaagatctccgactacatgaagtccagccgcttcctcccaagacctctgttcacaaagatggctatttggggcagcaagtaggaccctgacagggtggctttaggagaaagataccaaatctcctgggtttgccaagagccctaaggagcgggcaggattcctgagccccagagccatgttttcttccttccttccattccagtccccaagccttaccagctctcattttttggtcatcaattcctgccaaacacaggctcttaaaagccctagcaactcctttccattagcaaaatagccttctaaagttaaagtgccccgcccccacccctcgagctcatgtgattggatagttggctcccaacatgtgattattttgggcaggtgcaggctccccggcagatggggtctatctggagacagtagattgctagcagctttgaccaccgtagccaagcccctcttcttgctgtttcctgagactagctatgagcaaggtgtgctgtgtccccagcacttgtcactgcctctgtaacccgctcctaccgctctttcttcctgctgctgtgagctgtacctcctgaccacaaaccagaataaatcattctcccctt

SEQ ID NO: 725 - DNA, 3061 bp, Homo sapiens; identical to SEQ ID NO: 625

SEQ ID NO: 726 - DNA, 1334 bp, Homo sapiens
gagcgccaggccaatcggaggtgctgttgtttgtcagtcccggagccggtccgcaaaggaaaggtggcaagatggtgttggagagcactatggtttgtgtggacaacagtgagtacatgcggaatggagacttccttcccacccggctgcaggcccagcaggatgctgtcaacattgtatgtcactcaaagacccgaagcaaccctgagaataacgtgggcttgatcacgctggccaatgactgtgaggtgctgaccacactcacccctgacactggccgaatcctctccaagctccacactgtccagcccaaaggcaagatcaccttctgcactggcatccgcgtggcccatctggctctgaagcaccggcagggcaagaatcacaagatgcgcatcatcgccttcgtgggtagccctgtggaggacaacgagaaggatctggtgaaactagctaaacgccttaagaaagaaaaagtgaatgttgacatcatcaattttggggaagaggaggtgaacacagagaagctgacagcctttgtgaacacattaaacggcaaggacggaactggatcacatctagtgacagtgcctcctgggcccagcctggccgatgctctcatcagttctcctattctagctggggaaggcggcgccatgctgggtcttggtgccagtgactttgagtttggagtagatcccagtgctgatcctgaattggccctggcccttcgtgtctctatggaagagcagcggcagcggcaggaggaggaggcacgacgggctgctgcagcctctgcagctgaggctggaattgccacacctgggactgaaggtgaacgagactcagatgatgccctactgaagatgaccatcagccagcaggagtttggccgtgcggggcttcctgacctaagcagcatgacagaggaagagcagattgcctatgccatgcagatgtccctgcagggagcagagtttggccaagcagaatcaggggacatcgatgccagctcagccatggacacatctgagccagtcaaggaggaggatgactatgacgtgatgcaggacccagagttccttcagagcgtcctagagaaccttcccggtgtggatcccaacaatgaagccattcgaaatgcaatgggctctctggcctcccaggccaccaaggatggcaagaaggacaagaaagaggaagagaagaagtgaggccggagggaggggtagccgagtctgccctggggactgtaaggatggggttggataaagacttagatgtgctctgcggccttgacaacggaataaagcttggagttttccctttgcttc

SEQ ID NO: 727 - DNA, 8739 bp, Homo sapiens
agggtagccggcgtgcggggtgtgtatgtgttcgctgggcgccggctcagccccaggaagatggtggcggcggcggcggcggcggaggcgactgaggcgcggttgagggggtacacgacggcgacagcagcgcccgcgggctggaaggagaggcagcaccgaccctgcgccgcgacaggggcctggaggccgtggccgcgcgccgggctgtgtctcccgcgggtgctgtcgcgggcgctatccccgccgccgctgctgccgctgctgccgctgctcttttcgctattgctgctgccactgccccgggaggccgaggccgctgcggtggcggcggctgtgtcaggctcggccgcagctgaggccaaggaatgtgaccggccgtgtgtcaacggcggccgctgcaaccctggcaccggccagtgcgtctgccccacgggctgggtgggcgagcaatgccagcactgcgggggccgcttcagactaactggatcttctggatttgtaacagatggacctgggaattataaatataaaacgaaatgcacatggctcattgaaggacagccaaataagataatgagacttcgattcaaccattttgctactgaatgtagctgggaccatttatatgtttatgatggggactcaatttacgcacctctgattgctgcctttagtggcctcattgttcctgaaagagatggcaatgagacggcccctgaagtcactgtcacttcaggttatgcactactgcattttttcagtgatgctgcttataatctgactggatttaatatcacttacaattttgacatgtgcccgaataattgctcaggccgaggagaatgtaagagcagtaacagcagcagcactgttgagtgtgaatgttctgaaaactggaaaggggagtcctgtgacattcctcactgtacagacaactgtggctttcctcaccgaggcatctgtaacgcaagtgacaccagagggtgctcctgcttccctcactggcagggtcctggatgttcaattcctgtgccagctaaccagtctttttggactcgagaagaatattctgacttaaagcttcccagagcctctcataaagctgtggtcaatggaaatataatgtgggttgttggcgggtatatgttcaaccattcagattacagcatggttttagcgtatgacctggcttctagggaatggctttcactaaaccattctgtgaacagtgtggttgtaagatatggtcattctttggcattacataaggataaaatctacatgtatggaggaaaaattgattcaacagggaatgtgaccaacgagctgagagtatttcatattcataatgaatcatgggtattgttaacccccaaagctaaggatcagtatgcagtggttggacactcagcacacattgttacactgtcatctggccgtgtggtcatgttggtcatcttcggtcattgtccgctctacggatatataagtgttgtgcaggaatatgacttggaaaagaacacatggagtatattacaaactcaaggtgctctagtgcaagggggttatggccacagcagtgtttatgatcacaggaccaaggctctgtatgttcatggtggctacaaggctttcagcgccaacaagtaccggcttgcagatgacctctacagataccatgtggacactcagatgtggaccattcttaaggacagccgatttttccgttacttgcatacagctgtgatagtgagtggaaccatgctggtgttcggagggaacacacacaatgacacttccatgagccacggtgccaaatgcttctcctcagacttcatggcttatgacattgcttgtgaccgatggtcagttctccccagacctgagctccatcacgatgtcaaccgatttggccactcagcagtcttgcacaacagcaccatgtatgtgttcggcggcttcaacagcctcctcctcagtgacgtcttagtcttcacctcggagcagtgtgatgcacaccgcagcgaagctgcttgtgtggcagcaggacctggcatccggtgtctgtgggacacacagtcgtctcgatgtacctcctgggagttggcaactgaagaacaagcagaaaagttaaaatcagaatgtttctctaaaagaacccttgaccatgacagatgtgaccagcacacagattgttacagctgcacagccaataccaatgactgccactggtgcaatgatcactgtgtccctgtgaaccacagctgcacagaaggccagatctccattgccaagtatgacaattgccccaaggataaccccatgtactactgcaataagaaaaccagctgcaggagctgtgccctagatcagaattgccagtgggaacctcgaaatcaagagtgcatcgccctgcccgaaaacatctgtggcattggctggcatttggtcggaaactcgtgtctgaaaatcactactgctaaggaaaattatgacaatgctaaattgtcctgtagaaaccacaatgcctttttggcttcgcttacgtcccagaagaaggtggagtttgtccttaagcagcttcgattaatgcaatcatctcagagcacgtccaagctcactctgactccatgggttggtcttcggaagatcaatgtatcttactggtgctgggaggatatgtctccattcacaaatagtttgctgcagtggatgccatctgagcccagtgatgccggcttctgtgggatcttgtcagagcctagtactcggggactgaaggctgcaacctgcatcaacccactcaatggaagtgtttgtgaaaggcctgcaaaccacagtgccaagcagtgccggacaccctgtgccctgcggacagcatgtggtgagtgcaccagcagcagctccgaatgcatgtggtgcagcaacatgaagcagtgcgtagactccaatgcctacgtagcctcctttcctttcggccagtgtatggagtggtatacaatgagcagctgcccacctgaaaattgctctggctactgtacctgcagccattgcttggagcagccaggctgtggttggtgtactgatcctagcaatactgggaaaggcaaatgtattgagggaagctataaaggacccgtgaagatgccttcacatgcctctacaggaaatgtgtacccacagccccttctgaactccagcatgtgtctagaggacagcagatacaactggtcttttattcactgtccagcttgccagtgcaatggacacagcaagtgcatcaaccagagcatctgtgagaagtgtgaggacctgaccacaggcaagcactgcgagacctgcatatctggcttctatggtgacccgactaatggaggcaaatgtcagccatgcaagtgcaacgggcacgcatcactgtgcaacaccaacactggcaagtgcttctgtaccaccaagggcgtcaagggagaggagtgccagctatgtgaggtagaaaatcgataccagggaaaccctctcaaaggaacatgttactatacccttctcattgactatcagttcacttttagcctgtcccaggaagacgaccgctattacacagccatcaattttgtggctactcctgatgaacaaaacagggatttggacatgttcatcaatgcctccaaaaacttcaacctcaacatcacctgggccaccagtttcccagctggaacccagactggagaagaggtgcctgttgtttcaaaaaccaacatcaaggaatacaaagatagcttctctaatgagaaatttgattttcgcaaccatccaaacattactttctttgtttatgtcagtaatttcacttggcccatcaaaattcaaattgccttctcccagcacagcaattttatggacctggtgcagttcttcgtgactttcttcagctgtttcctctctctgcttctggtggcggcagtggtctggaagatcaagcagagctgttgggcatccaggaggagagagcaacttcttcgggagatgcaacagatggccagccgcccttttgcttctgtaaatgttgccttggaaacagatgaagaacctcctgatctcattgggggaagtataaagactgttcctaagcccattgccctggagccctgctttggtaacaaagctgctgtcctctctgtgtttgtgaggctccctcgaggactgggaggaatccctcctcctggtcagtcaggtcttgctgtggccagtgccctggtggacatttctcagcagatgccaatagtgtacaaggagaagtcaggagctgtaaggaaccggaagcagcagccccctgcacagcctggaacctgcatttgatactggggcaggaactctccctcacagaggggcatgtggtccactaagctgtctacaggggaggctgcaggcaggaagctggtgtggggcagaagactggaaacccttgaagcatccaactcacgtgcatgatcatacaagctgttttgatggttcatcccttctgtgtccagcatctaaccttttacttctgtgtaggaaataatttaattacaagtccaggagtgatctgctctactcatgggtggaggagaccagtgtagacccagtgagagctaaaagtgatgcagaggtccctgtggaagctcaactgcaaaagtgatgccctccgtcagcagctctccagcatgtcctctcgattgatcctcagatgaattgttctcatctgaagcttgctgtctttttacaagatgtgcttttactctcttccaggaagtaggttttttcagctgagaattaataatgatctttctctttggaagtcatatcaaagtataattgatgggggccttgttttgttttgttttggagacagggtctcactgtgtggtcctagctggcctggaactcaccatgtagatcaggctggactgaactcttaaaagttgacctgcctctgcctcataaattctgggatagaaagcgtgtaccaccaggcccagcaaagagggctattctaaatgtcacggtcaatggagttagaatatagacaaatgcagttgataattccctatagaaacttgatcaatttaattttaatccattctttccttctcttttttctcactctgtcttacacacatacacacgtgcacacacacacacacactaagtgcctagactttaattagatctagcaattggaacgttagtaagcctgagtttttacatgattgcattcctacatccttgtaaactttaagtaaccaccattgcagttggttcctttgttaaagtctaatttgcagccaagaaagaataattctcatcccaagaaacacttaatagggactactagcaataggaactaaatgaccctcccccccagcctagtgtcacttggctccttctgccaaggcaccacagagtgcacttgctcatgtcatgtgcctctctgagcagacgcctgggacacctggctctgtcttcctacagctgctcgcactgacctgtgggaacctgtgggtcatccccaggctggatggagtacacactagaagagggatagtgcctggcattggggcagcatctgctcagcacacggaaaggggcctggttccctctcccctggtaggagttggtccagcctcctcccagacccagctggaggctgagaggaggtggtgaatgctaatgaggatgaaaagacatggggtgaaaggaagggacaagacccacttccaaagaagattaccatgttaagaggggtgagcagtcctctgctctgcccaggaccctgcctggacactgcattcccatttatggtgctcagtattctggcattatgcagcagcctcacacctttcctctcctgcttcataccctgcagttctcctattatctgactagaacagccctctaggcaacagtgatcaatttatgagtttggagaagctaataatcagaaggataaaagctgtagcatttcacctttaatacagtgctgaagagggagcctttctctgagccccgcactaacctcattccacacaagacttctgcaagtgacgtctccacgctgaaccctaagtcactgatgcacaacactgctgtaagactcacctctcaaaacacgactttttcgtcactattaaggagcagaaagttctagaaatgatcccaacctcgtcccctgtgcagctaggatctccccacatccctaacaaagccgagcacataagtgtctgtggtctagcgtttcatctccatagcaacccaagggactcttggccagaagaaagagagagggaagcctcactaggggttggccttatggaaggaaatcccccctctgctttgctttaaggaccaaatttctttggccaaagaagttgtttccgtgttagtcccataccttgaaataatacgtaccatggctcccacctacctgtttatgtccccccaatcacctttagggatactgtttattctttaaaaagaagcagatggcatttgtttctgctcctgtaatggagaaacagccagcttcacctgcatcccctttacagccagcagctcccttcagacgtaaagcagaggggatggcagagaagagctcagctcagagccagtgacccagtgattctgtcacgagagaacttgtatataaagtagtcatgaagacactgaccttgcacttgtacataactatactatagtgtccagaatgttcagacattcagggtgtacataaacagaaaagtatcataatgtatttttattaaacagtaacatcttgagtttcacctaatctgtttctgtgccatagactgggtatccgagctctgggagatcatcttcccagaccccagtccgtcgataaggcattgtacaccatgctggtgtgttcggtagcctcgtgcccattaggtaactaaacaatgattcagctcttagaatacaggaagagagcaagcctggtgacacacagctgtgatccaagcattcagaagacagaggcaggaagaaaaaattcaaagatggggctggagagatgcctcagtggttaaggctgctcttggacaggacactggttcagttcccagcactcacatggtggctcacaaccttctatgactacaaccccaggtaacccaacaccctcttctgtcctcctcgggtgcctgtggcggtgtacatggtgcacagcacgaacaggcaaaacacccaatacacacagaaataaagaattcaagaataccctgggctacatagcaataccctgtctcagaacaaaccaacccatgaagagccaggcagtgtgtctatttccatgaccgtacacaagcgaactcaggaagcaagagtgtccatcactgctgtaacgtcaatgctccttgtgatttcggcatctctgtggggcgaggtgttctatcactctaaagtcaaggactatgtcacctgtgaacgtctagactttgcaaaggggctctctaggctgcattgttgtggctttgtctaaaattttaatgacatttctgagaaccatgttctttttatactaaaaactggggatgggagggctcatttgttgataaatagcactattttcccacacctcagcctcctgtccccgtcctggtcttccctacacagtctggagagggctctgaaaggtccaaatcggtgtggcacaaaagcaacccattgcctcctgagctaacctggaagatgactgtcagcaaaaggaaaataccagaatatcttgaaggctagaagcgtaagatgggatctcattagggaactggatgaacaagagcagagagcctctggtgggtaacgctgcagcctgccagcgcccgccctctctcaacatagcagagtgtgcatggtaaggaagtgaatcacctccttgggggatggtgctgtttttatgaaaacctttgatccttggtgtcctttaattgatctgttcaacaaatatttactaaacacttgtaagctaagctaacattagggcagtgactgaggtgaaaacccagctctttagacagctatcatcctaggagagcttcctagaagcagaaccaagaagccagaggttcttcctaggatgagctttggcttcctaaggaaatctgaaatgttgaccctggtcacaacctcccagcacagctttggaatgagacatcagcatggcctcctctggctgagcagagcctctggagctccacaccctgcctgcagggagccctcagggtgccctccagagtgcagggagaaactggcaccttctttcctaaaggcaataacagaagctgctctcagaacttgactctgcacaaaacactagtgaagcctgctgaactaattctgcctctggaaatcttttctggttatttacagtttgttgttttgttttgatccaagcttagtttgttaatatgtgtaacttggcatctgttgcacttgtgtaaatatggagtaagtattgtaaactatttaattgctgggattggtggtgttatacatacatttaggactgcaatttttggtattttttgtattgtaaaataacagctaatttaatcaggaacaagagaattaatgggggggtctgcattttaaatgcaaatgtgaagcacttgtatataaacagaagtaaatactataatacaaaattccttctgaaataaaagtagatctggtaaaaaaaaaaaa

SEQ ID NO: 728 - DNA, 1574 bp, Homo sapiens
acaacttcaaagcaaatgaagttcgttctgctgctttccctcattgggttctgctgggctcaatatgacccacacactgcggatgggaggactgctattgtccacctgttcgagtggcgctgggctgatattgccaaggaatgtgagcggtacttagcacctaagggatttggaggggtgcaggtctctccacccaatgaaaatattataattaataatccatcaaggccttggtgggaaagatatcaaccaatcagctacaaaatttgctcaaggtctggaaatgaaaatgaattcaaagacatggtgacgaggtgcaacaatgttggtgtccggatttatgtggatgctgtcattaatcacatgtgtggctcgggcaatagtgcaggaacacacagtacctgtggaagttacttcaatcctaataacagggaattctcagcagttccatactctgcttggtattttaacgataataaatgtaatggagaaattaataactacaatgatgccaatcaggtcagaaattgtcgtctgtctggccttctggatcttgcactcgataaagattatgttcgaaccaaggtggctgactatatgaacaatctcattgacattggtgtagcagggttcagacttgatgctgctaagcacatgtggcctggagacataaaggcagttttggacaaactacataatctaaatacaaaatggttctcccaaggaagcagacctttcattttccaagaggtcattgatcttggtggtgaagcaattaaaggtagtgagtactttggaaatggccgcgtgacagaattcaagtatggtgcaaaacttggcacagttattcgcaaatggaatggagagaagatgtcttacttaaagaactggggagaaggttggggttttgtgcctactgacagagcccttgtgtttgtggacaaccatgacaatcagcgaggacatggtgctggaggagcatccatcctgacattctgggatgctagaatgtataaaatggcagttggatttatgttggctcatccttatggattcaccagagtaatgtcaagttaccgaaggacaagaaatttccagaatggaaaagatgtgaatgactggattggaccacctaataacaatggagtaacaaaagaagtgaccattaatccagacactacttgtggcaatgactgggtctgtgaacatcgatggcgtcaaatcaggaacatggttgccttcaggaatgtagtcaacggtcagccttttgcaaactggtgggataatggcagcaaccaagtggcttttagcagaggaaacagaggattcattgtctttaacaatgatgactgggctttgtcaagcactctacagactggtcttcctgctggcacatactgtgatgtcatttcaggagataaagtcaatggcaattgcactggacttaaagtaaatgttggcagtgatggcaaagctcacttctctattagtaactctgctgaagacccattcattgcaatccatgccgactcaaagttgtaagagtcaaattaaagagatttagattcagcacc

SEQ ID NO: 729 - DNA, 1719 bp, Homo sapiens
cgggtgtgagcggggttattgaagtaaaaatgtccagaaaaatccatggcggttctgtggtggaaatgcaaggagatgaaatgacacggatcatctgggaattgattaaagaaaagctcattcttccctacgtggaactggatctgcatagctatgacttaggcatagagaatcgggatgccaccaatgaccaggtcaccaaggatgctgcggaggctataaagaaatacaacgtcggcgtcaagtgtgctaccatcacccccgatgagaagagggttgaggagttcaagttgaaacaaatgtggaaatcacccaacggtaccatccggaacattctgggcggcactgtcttcagagaagctattatctgcaaaaatatcccccggctagtgacaggctgggtaaaacccatcatcattggccgacacgcctatggggaccaatacagagcaacagatttcgttgttcctgggcctggaaaagtagagataacctacacaccaaaagatgggtcgcagaaagtgacatacctggtgcatgactttgaagaaggtggtggtgttgccatgggtatgtacaaccaggataagtcaattgaagattttgcacacagttccttccaaatggctctgtcgaagggctggcctttgtatctaagcaccaagaacactattctgaagaagtatgatggacgcttcaaagacatcttccaggagatctatgacaagcaatacaagtccaagtttgaagctcagaagatctggtatgaacacaggctcatagatgacatggtggcccaggctatgaaatcagaaggaggcttcatctgggcctgtaagaactatgatggtgatgtgcagtcagactcagtagcccaaggttatggctcccttggcatgatgaccagtgtgctgatttgtccagatggtaagacggtagaagcagaggctgcccatggcactgtcacacgtcactaccgcatgtaccagaaaggacaggagacgtccaccaatcccattgcttccatttttgcctggtcccgagggttagcccacagagcaaagcttgacaacaatactgagctcagcttctttgcaaatgctttggaagaagtctgcattgagaccattgaggctggctttatgactaaggacttggctgcttgcattaaaggcttacccaatgtacagcgttctgactacttgaatacatttgagtttatggacaaacttggagaaaacttgaaggccaaactagctcaggccaaactttaaggtcaaacctgggcttagggcaaatctttgtggtaactaagtccacagtttacatatttcctttttgttttaataacactcaaggttaaaaacaagaatcattttgtaatttgtttagaagacgaagttgaacttttctatatgtttacagcctattttctttttcatacagttattgccaccttaatgaatgtggtggggaaggtttttttaattgtattttactgtgtaatagcagtctaggaattgtgttagtatctgttcacaattaactgtcactttttatttgctctaatgtaaatgaccaaaatcagaaatgctccaagggtgaacaatcactacactatgtttccccgtaaaggtgaaggagaggctcacctcccctactgtccatgagtgtgaacacagggagcaaaagtgtgcaaatgttgcactgtgtgtggaa

SEQ ID NO: 730 - DNA, 2061 bp, Homo sapiens
aacacaccagggaagtggcaaccctgaacatcaggagtcggcaatcacagaggctggcagctggctggtatcggctctgcagcctgaagactggagaagatgacccgccttgtgacttggagctcttgatggatgggatcggctctgctctcctctccttcccagattgcatactgggagaggacactctattccatgaagaccaagacaaggggacacaactggacagtctcacattggcctccatcaatactgactttgccttcagcctctacaagaagctggctttgaggaatccacataaaaatgttgtcttctccccacttagcatctcagccgccttggccgtcgtgtccctgggagcaaagggcagcagcatggaagagattctagaaggtctcaagttcaatctcacagagacccctgagacagaaatccaccggggctttggacacctcctccagaggctcagccagccaagggacgagatacagatcagtacaggcaatgccctgtttattgaaaaacgccttcaggtcctggcagagttccaggagaaggcaaaggctctgtaccaagctgaggccttcacagctgatttccagcagtctcgtgaggccaaaaagctcatcaatgactatgtgagtaaacagacccaggggaagatccagggactgatcacaaacctagctaagaagacatccatggtactggtgaattacatctactttaaaggcaaatggaaggtgccttttgaccctcgggacacattccagtctgagttctactctggcaaaaggaggtctgtgaaagtgcccatgatgaagcttgaggacctgaccacaccctacgtccgggatgaggagctgaactgcactgttgtggagctgaagtacacaggaaatgccagcgccctgtttatcctccctgaccagggcaagatgcagcaggtggaagccagcttgcaaccagagaccctgaggagatggaaggactctctcaggcccagcatgatagatgagctctacctgcccaagttctccatctctgctgactacaacctggaggacgtccttccagagctgggcatcaaagaagtcttctccacacaggctgacctgtctgggatcacaggggataaggacctgatggtctttcaggtggtccacaaggctgttctggatgtggctgagacaggcacagaagcagccgctgccacaggggtcaaatttgttccaatgtctgcaaaactggaccctctgattatagctttcgaccggcctttcctgatgattatctctgacacagaaactgcaatagctccctttttggccaagatatttaaccccaaatgagattcgaacttcccaagagttgatgcttctcctgaggcattgagcctgtctgtgggtctctgtgtgcattttcgcttctatgctgtgattggccatggcggcatgcctggatgagacagtaactaactgtgtaacagtcctcatgtacagacgcctgtgcagagtcgctgccatgctcccaaacttcttggtaccactagctcatatttctgagcctaaaatttgtctttcccctgcccttgctctctctcccctgtatctgcctcaacccagaagccagggccccatcaggttgtctcagtcccaacttaggctctagttatatcttccttcagcgttgctgtcttgatgggactgtgcacgattaccggccaacccacatggaccaagaagaacacttgctggtccctatctttctgcagtatgtgggaatcacttggtgcccagtgctgcctcactatttccttcctctgggcacagtgctccttgcagcactggcctgactttgtccacatctggcacagagctggagccctcccttctgcagatgcatggcacctgtgggtcagaccagatccccctccccagcactcctacttagagcaatgcagcctttcttttagttcccagctgaccaacctcacacaaaagatgaccaacaacaaccaaaatgaagaggtaggagcaaaggatcaataaacacatc

SEQ ID NO: 731 - DNA, 1624 bp, Homo sapiens
gccctagcgcacatggcggttcttggcatcaccattgccttgctggtgtgggtggccaccctcctcgtcatatccatctggaagaagatctataacagttggaacctgcccccaggacctttccctcttcccatccttgggaacatttttcagctggatttgaaggatatccccaagtctttcaccaagttggcaaagcgcttcgggccagtgttcacactgcaccttggctcaaggcgcatcgtggtcctgcatggctacaaggctgtcaaggaggtgctactgaaccacaagaatgagttttctggacggggggacattcctgtgttccaggagtacaagaacaaggggattattttcaataatgggcccacatggaaggatgtgcggaggttttccctaagcattctccgagactggggaatggggaaacagggtaatgaggcccgcatccaaagggaggcgcaattcctggtggaggagctcaaaaagaccaaaggccagccttttgaccccacatttctgattggctgcgcaccctgcaatgtcattgcggatatcctcttcaacaaacgtttcgactacaatgacaagaagtgtctgaggctcatgagtttgttcaatgaaaacttctacctgctgagcaccccctggatccagctttacaataactttgcggattatctacgatacctacctggaagccatagaaaaatcatgaaaaatgtgtctgaaataaaacagtacacacttgaaaaagccaaggaacaccttcagtcactggacatcaactgcgcccgggatgtgactgactgtctcctcatagagatggagaaggaaaaacacagccaagaacccatgtacacaatggaaaatgtttctgtgactttggccgacctgttctttgcaggaactgagaccaccagcacaactctgagatatgggctcctgatcctcatgaaatacccagaaattgaagagaaacttcatgaagaaattgacagggttattgggccaagccgcgtccctgctgtcagagacagactggatatgccctacatggatgctgtggtgcatgagatccagagattcatcaatcttgtcccttccaacctaccccatgaagcaaccagagatactgtgttccaaggatatgtcatccccaagggtacagttgtgattccaactctggactccctcttatatgacagccatgagtttccagatccagagaagtttaaacctgagcatttcctgaatgaaaatgggaagttcaagtacagtgactatttcaaggcattttctgcaggaaagcgtgtgtgtgttggagaaggcctggcccgcatggaattgtttctgctcctgtctgctattctgcagcattttaacctgaagtctctggttgaccctaaggatatcgacctcagtcctgtcacagttggctttggcagtatcccaccccaatttaaactctgtgtcattccccgttcatgagacctgaaaacttcctgatatcccttccattgttatcccttaaactatgactgtttttaaaaaacccaagcatatagagttcctatcataaaatgaaaccgaaaaaataaataaaaccttgatgaattgt

SEQ ID NO: 732 - DNA, 1624 bp, Homo sapiens; identical to SEQ ID NO: 731

SEQ ID NO: 733 - DNA, 1624 bp, Homo sapiens; identical to SEQ ID NO: 731

SEQ ID NO: 734 - DNA, 1605 bp, Homo sapiens
agtcattacaacccaggtgtggatgctggagtgtttcctttgtcttctattttaaagatatcttgaaaaaaacctgtcactgtccttttcctgcgaccatgtcttccatcaagattgaatgtgttttaagggagaactacaggtgtggggagtcccctgtgtgggaggaggcatcaaagtgtctgctgtttgtagacatcccttcaaagactgtctgccgatgggattcgatcagcaatcgagtgcagcgagttggtgtagatgccccagtcagttcagtggcacttcgacagtcaggaggctatgttgccaccattggaaccaagttctgtgctttgaactgggaagatcaatcagtatttatcctagccatggtggatgaagataagaaaaacaatcgattcaatgatgggaaggtggatcctgctgggagatactttgctggtaccatggctgaggaaacggccccagctgttctggagcggcaccaagggtccttgtactccctttttcctgatcacagtgtgaagaaatactttgaccaagtggatatctccaatggtttggattggtccctggaccataaaatcttctactacattgacagcctgtcctacactgtggatgcctttgactatgacctgccaacaggacagatttccaaccgcagaactgtttacaagatggaaaaagatgaacaaatcccagatggaatgtgcattgatgttgaggggaagctttgggtggcctgttacaatggaggaagagtaattcgcctagatcctgagacagggaaaagactgcaaactgtgaagttgcctgttgataaaacaacttcatgctgctttggagggaaggattactctgaaatgtacgtgacatgtgccagggatgggatgagcgccgaaggtcttttgaggcagcctgatgctggtaacattttcaagataacaggtcttggggtcaaaggaattgctccatattcctatgcagggtaaactgcagctcttccttgctgtcagaagaaaaagctttgaagacaactggagaattaagggagagaaatcaatgaactttcaatcttgtttttttaatgaggcagtgatattatagcatggttaaactgctttaatttacacttttgattgggtgctggggaataaacctaaagcatggcatattaatgaagaacatatggtaaccatgaactccatctctggattcctttatttacaattttttaaaggttgaatattcgcaccagagaatgacaagtggttttgacaacatactctaggccttctattaaaaacaatctgtagaaaaggagctcaactatcaatcatcctgatcaattgctctggggcttgaaatgagacaatttccattctttttttttgcattccatacttgctgtacataaggcttccaaaaaatcaacgcatagaaacttagttgtaatttataatgattgtgtgacttttcatgtgttattttacaaactaaaatattaccagatgttattcaaacactggagcacaaactgtggttttaactgccacctagtggctatacaaataaatgcatcacattacaaagaaaaaa

SEQ ID NO: 735 - DNA, 1941 bp, Homo sapiens
caggatccgtgtggtccccttgtcataggctggagatctcgctgtcccccaagcctgtagccttctatcatgtgcctctatgctctgatcctggtgtttcttgcagcattcacagcagggggacacccatcgtcactacccgtagtggacaccctgcaaggcaaagtcctcgggaagtacgtcagcttagaaggattcacacagcctgtggccgtcttcctgggagtcccctttgccaagccccctctcggatctctgaggtttgctccaccacagcctgcagagccctggagcttcgtaaagaacaccacctcctaccctcctatgtgctcccaagaccccgtggcagggcaaatagtcaatgaccttctaactaactgggaagagaacatttctctccagttttctgaagactgtctctacctaaatatttacacgcctgctgacttgacaaaacgtgatagactgccggtgatggtgtggatccatggaggtggactagtgttaggtggggcatccacctatgatggactagccctgtctactcatgaaaatgtggtggtagtggtcattcaataccgtctgggtatttggggattcttcagcacaggggatgaacacagccggggcaactggggtcacttggaccaggtggctgcactgcactgggtccaggacaacattgacaactttggaggggacccaggctctgtgaccatctttggagagtcagcaggaggtgaaagtgtctctgttcttgtgttgtctcccttggccaagaatctctttcacaaggccatttccgaaagtggcgtggccctcactgcaggcctggtcaagaagaacaccaggcccttggctgagaaaattgctgttgtatctggttgtaaaagcacaacttcagcttccatggttcactgccttcgccagaagacagaggaagagctcttggagaccacactaaaattgaatcttttttcgctggatttgcacggagactccaggcagagctatccgtttgttcccactgtgcttgatggagtggtgctgccaaagatgcctgaggagatcctggctgagaaggacttcaacactgtgccctacatcgtgggaatcaacaagcaagagtttggctggattctgccaacaatgatgaactatccaccctctgatatgaaattggacccgatgacagccacatcgctcttgaagaagtcttcttttcttcttaaccttcctgaagaagcaattccagtggccgttgagaagtatttaagacacacagatgacccagacagaaataaagaccaacttctggaattgattggggatgtgatcttcggtgtcccatcagtgattgtctcccgtggacatagagatgctggagcccgcacatacatgtacgagtttcaatatcgcccaagcttctcatcaaaaatgaaaccaagtacggtggtaggagatcatggagacgaaatctactctgtctttggtgctccaattttaagaggtggtacctcaaaagaggagatcaatctcagcaagatgatgatgaaattctgggcaaactttgctaggaatgggaatcccaatggacagggcctgccccattggccagagtatgaccaaaaggaaggttatcttcagattggagccaccactcaacaagcccagaagctaaaagaaaaagaagtggctttctggtctgagcttctggctatgaagccactgcatgcaggacacactgagctatgaacgggagctctgccagcctcatcctcagggcagctcacatggaagatggttttggccaaggctttgaggagacttcagaactgtgtggtgggagtgggcagaggccagggagaggatatttgcacatgtggactcaaactgaaaaataaattttgttttataaatcaaaaaaaaaaaaaaaaaaaa

SEQ ID NO: 736 - DNA, 2441 bp, Homo sapiens
gatctggtcggtaccggagagcgcaggttgtatcaccaacatgggggactctcacgaagacaccagtgccaccatgcctgaggccgtggctgaagaagtgtctctattcagcacgacggacatggttctgttttctctcatcgtgggggtcctgacctactggttcatctttagaaagaagaaagaagagataccggagttcagcaagatccaaacaacggccccacccgtcaaagagagcagcttcgtggaaaagatgaagaaaacgggaaggaacattatcgtattctatggctcccagacgggaaccgctgaggagtttgccaaccggctgtccaaggatgcccaccgctacgggatgcggggcatgtccgcagaccctgaagagtatgacttggccgacctgagcagcctgcctgagatcgacaagtccctggtagtcttctgcatggccacatacggagagggcgaccccacggacaatgcgcaggacttctatgactggctgcaggagactgacgtggacctcactggggtcaagtttgctgtatttggtcttgggaacaagacctatgagcacttcaatgccatgggcaagtatgtggaccagcggctggagcagcttggcgcccagcgcatctttgagttgggccttggtgatgatgacgggaacttggaagaggatttcatcacgtggagggagcagttctggccagctgtgtgcgagttctttggggtagaagccactggggaggagtcgagcattcgccagtatgagctcgtggtccacgaagacatggacgtagccaaggtgtacacgggtgagatgggccgtctgaagagctacgagaaccagaaaccccccttcgatgctaagaatccattcctggctgctgtcaccgccaaccggaagctgaaccaaggcactgagcggcatctaatgcacctggagttggacatctcagactccaagatcaggtatgaatctggagatcacgtggctgtgtacccagccaatgactcagccctggtcaaccagattggggagatcctgggagctgacctggatgtcatcatgtctctaaacaatctcgatgaggagtcaaacaagaagcatccgttcccctgccccaccacctaccgcacggccctcacctactacctggacatcactaacccgccacgcaccaatgtgctctacgaactggcacagtacgcctcagagccctcggagcaggagcacctgcacaagatggcgtcatcctcaggcgagggcaaggagctgtacctgagctgggtggtggaagcccggaggcacatcctagccatcctccaagactacccatcactgcggccacccatcgaccacctgtgtgagctgctgccacgcctgcaggcccgatactactccattgcctcatcctccaaggtccaccccaactccgtgcacatctgtgccgtggccgtggagtacgaagcgaagtctggccgagtgaacaagggggtggccactagctggcttcgggccaaggaaccagcaggcgagaatggcggccgcgccctggtacccatgttcgtgcgcaaatctcagttccgcttgcctttcaagtccaccacacctgtcatcatggtgggccccggcactgggattgcccctttcatgggcttcatccaggaacgagcttggcttcgagagcaaggcaaggaggtgggagagacgctgctatactatggctgccggcgctcggatgaggactatctgtaccgtgaagagctagcccgcttccacaaggacggtgccctcacgcagcttaatgtggccttttcccgggagcaggcccacaaggtctatgtccagcaccttctgaagagagacagggaacacctgtggaagctgatccacgagggcggtgcccacatctatgtgtgcggggatgctcgaaatatggccaaagatgtgcaaaacacattctatgacattgtggctgagttcgggcccatggagcacacccaggctgtggactatgttaagaagctgatgaccaagggccgctactcactagatgtgtggagctaggagctaccagcctcccacccctcgctccctgtaatcacctaacttctgccgacctcacctctggtggttcctgcctggcctggacacagggaggcccagggactgactcctcctggcctgagtggtgccctcctgggcccctaggcagagcccggtccattgtatcaggcagcccagccccagggcacatggcaagagggactggacccacctttgggtgatgggtgccttaggtcctctgcagctgtacagaaggggctcttctctccacagagctggggtgcagcccccacacgtgattttgaatgagtgtaaataattttaaataacctggcccttggaataaagttgttttcagtaaatt

SEQ ID NO: 737 - DNA, 2441 bp, Homo sapiens; identical to SEQ ID NO: 736

SEQ ID NO: 738 - DNA, 2441 bp, Homo sapiens; identical to SEQ ID NO: 736

SEQ ID NO: 739 - DNA, 2638 bp, Homo sapiens
cacaatcttcaatgagtagacatattcctcagttctgtggtgttctcggtcacacatttatggagtttctgaagggcagtggagactactgccaggcacagcacgacctctatgcagacaagtgaactgtagaaattcattactactccaccaagaagcccccataagagtggatagcctggacacagtcgtgttgaattgaaatctgcagagcattttccaagagctcagacctggatggggtaaacctcagtgcacttcctctgtatcgcctcagtattcctggattgaagagtcactgcttcttgtgaggaggttcatttcattgcccgtttctcccgactcatactcaaagcactgagaatttcaagtggagtatattgaatattgaagtagacttcaggttgttttttggttttgttttggttttttgttttgttttgttttgttttgttttggttttcagtttttgtttggaatcatttctgtattcaattttttaattctttcataaccctattgggtgtttttttaaactaaattaacatggctcgaatgaaccgccctgctcctgtggaagtcacatacaagaacatgagatttcttattacacacaatccaaccaatgcgaccttaaacaaatttatagaggaacttaagaagtatggagttaccacaatagtaagagtatgcgaagcaacttacgacactactcttgtggagaaagaaggcattcatgttcttgactggccttttgatgatggtgcaccaccatccaaccagattgttgatgactggttaagtcttgtgaagattaagtttcgtgaagaacctggttgctgtattgctgtccattgtgtcgcaggccttggcagagctccggtgcttgttgccctagcattaattgaaggtggaatgaaatatgaagatgcagtacaattcataagacaaaagcggcgcggagcttttaacagcaagcaacttctgtacctggagaagtaccgtcctaaaatgcggctccgcttcaaggattccaacggtcatagaaacaactgttgtattcaataaaactggggtgcctgatgccattgccttggaagaggaacttcagatgggacctgatttgttatttacccaatgtgtccacttacctgtggaagctccaggggaatattgaaaaagttttaccaggccacaagcttgacagaattgcaacctctataattgggctatgatcaacacgtttggacacttagcaaaagatttttgctggtcagcatttaaaatgtgcttattatttgtaccaattgacctttcctaaaataaggtattgagtaatgtcattaaatgtactcctgtgccagaatattattagtctataaggaatttagaaggattaggtgccaaaatacccagcacaatacttgtatatttttagcatcatacagaaccaaaattccaagaactaagaactctccagaccttccatggtgtattccttcagtcatttcaaacaccgcagggcttctcttgttatctgcctgctcactctatgtttacatctcccacacttacaccagaacacatcaggtttgcttagctatcttttaagtcttgcaatgattatttaatgtctctgtcttattttgtgctgttttgggaaacctccatttgaaaatcaactttgttacagaagcacatatcttcaataatgtctccagacaaaaagccttatagttaatttaatgtttgcactcgggtgcaacctgacagggagggcctgaacaagaaaggagaggaggctattaaatatttttagtaatatgttgcctttgtcttgtgcagaacatgtagagtatgctctttaatttagtaaatatttttaagacgtagagatacattgttgtagctaaccacttaatcaaaatttctgaaattcttgtgttttccatacctatctgaggttttccaacttgtttgaattatggttttccccttctcttcccaatctcttgcaaaaaagtaaaagtgggatctgctagtgaactgagcagaaatattttatacgccttttgagctatgtaacttaataattggatacttgatcatttgttttattatgtaatcgataaaatggtgatgtgtattaatgttagttcaaccatatatttatactgtctgggaatgtgtggttatagttctgtgggagaaatagtttgtcagtgttcaccagcttgtaaaaacttagtgcgagagcttcaacatctaaataaatgatgaaacgcattcgtcactgaggtcactttgcttaaaattaacttaatttgtagaaaacagtggattcaattattatcatttcagtttatggacaaatttgttagggttaccaagtgcgtttaaaaattgctctttaaaggtctagataattgtgaatcaattgaatgttgggtaccaagggaaaacggtttgtaatagttgatgaccttgatttttaattcaattccaccagtcacttgtagctttatgcagtttccaatccacttttctcatttttaagtttattacttacctgtatatattttgaaattaatttgaacctgcgtatttggcacatgatggcttataaattttaactttc

SEQ ID NO: 740 - DNA, 2110 bp, Homo sapiens
gaacagcagtccgcccaactctgcgtgcgcaccagccttactcgagtcccgccccatcctagtggggttaccgcctctctccaggacactgggttcctaggttgctgccccaggcttaatgattgtccagaaggcggctataaagagcctgggtggaggagagagcgcagaaaaacacagctcagcagatccgggcactggagagggagctgcaagcaggagcagtcaagagtgtggtcagaagcaccgtgagtggaccagcagggccggctttttctaccatggcggcccaaggctatggctattaccgcactgtcatattcacagccatgttcggaggctacagcctttactacttcaaccgcaaaaccttctcttttgtcatgccctccttggtggatgagatcgctctggacaaggacgatttggggctcatcacgagcagccagtcggcagcctacgccatcagcaagtttgtgagcggggtgctgtctgatcagatgagtgcccgttggctcttctcctctgggctgctcctggttggtctggtcaacgtagtcttctcgtggagctctacagtgacggcttttgctgctctctggtttcttaatggtctggcacaggggctaggctggcccccctgtgggaagatcctgaggaagtggtttgagccatcccagtttggcacttggtgggctgtgttgtcaaccagcatgaacctggctggaagcctgggacctatcttggcgacaatccttgctcagagctacagctggcgcagcaccctggccctgtctgggtcactgtgtgtggttgtctccttcttctgtctgctgctcatccacaacgaacctgctgatgttggactccgaaatctggaccctgccccctccaagggcaaaaagggctcgtcaaaggaggagagcaccctacaggacctgctgctgtccccctatctctgggtgctctccactggctacctcgtggtctttggggtaaagacttgctgtacagactggggccagttcttccttatccaggagagagggcagtcggccctcgtgggtagttcctacatcagtgccctagaggttggaggccttgtaggcagcattgcagctggctatctgtcagacagggctatggcaaaggcagggctgtctgtgtatgggaaccctcgccacagcctgttgctgctcatgatggctggcatggcagcatccatgttcctcttccgggtaacggtgaccagcgactcgcccaagatctggatcctggtgttgggagccgtgtttggtttctcttcttatggtcccattgccttgtttggagtcatagctaatgagagtgcacctcccaacttgtgtggtacctctcatgctattgtggggctcatggccaatgtgggtggatttctggctgggttacccttcagtaccatcgccaagcactatagctggagcacagccttctgggtggcagaagtgatctgtatagccagcacagttgtcttcttcttgcttcgaaatatccgcaccaagatgggccgagtatccaagaaggcagagtgaaaagagcactcactatagagcatccccaactgcaacctcattggcaggacacagaaaggaagagaggctgctctggctagaacagagcctttacatatctgtgtctacactgtctctctggacctccgtggtgctgcaagttaccagtggctaatgaggtcctatgctctatttaaatgatgtttggttttaggctccattggcttctgtttctaccttctagcagacagacaactcctaaattcagggtgtctcctatacccctcttcctctcctgagtccccatctcctagtgaggtggttctatctctgcagctgcagaatattaatggcctgtggtttctgctgtaccccaaggcttcttgttaggggtcaacactgttgccaatacctcagtccctaagggaggagaggaggccaccactctcatcagtaccctgggacaaaagggaggaatgtagagagcaaactgtcttgtatagactaataaaactagatttgatactaaaaaaaaaaaaaaaaaaaaaaaaaaaaaaaaa

SEQ ID NO: 741 - DNA, 2110 bp, Homo sapiens; identical to SEQ ID NO: 740

SEQ ID NO: 742 - DNA, 3360 bp, Homo sapiens
gccttgcagcggcgcgggcaaacggagaggccgcgggaggcgcgaagccggcagaaggcgagggagagcggagggcggccatggtccagccctgaagccaaacaaaaaaggcctacttcgaaagctgtcaacaatgaatgactctaaagatgcccctaagtcctatgacttcgacctgatcatcattggaggaggctcgggaggcctggcggcagctaaggaggcagccaaatttgacaagaaggtgatggtcttggacttcgtcacaccaactcctctcggaacgaatgggggtctcgggggaacgtgtgtgaacgtgggctgcatacctaaaaaactgatgcaccaggcggctctgttaggacaagctctgaaagactcacgcaactatggctggaaactcgaggacacagttaagcatgactgggagaaaatgacagaatctgtgcagaatcatatcggctcgctgaactggggctaccgagtagctctccgggagaagaaggtcgtctatgagaatgcttacgggaaattcattggtcctcacaaaattatggcaacaaataacaaaggtaaagaaaaagtttactcagcagagcggttcctcattgccaccggtgaaaggccacgctacctgggcatccctggagacaaagagtactgcatcagcagtgacgatcttttctccttgccttactgcccggggaagaccctagtggttggcgcgtcctatgtcgccttggaatgtgcaggattcctggctggtatcggcctcgacgtcactgtaatggtgcggtccattctccttagaggatttgaccaggacatggccaacaaaattggtgaacacatggaagagcatggtatcaagtttatcaggcagttcgtgccgacgaaaattgaacagattgaagcagggacaccaggccgactcaaggtgaccgctaaatccacaaacagtgaggagaccatagaagacgaatttaacacagtgttgcttgcagtaggaagagattcttgtacaagaactattggcttagagaccgtgggcgtgaagatcaatgaaaagaccgggaagatacctgtcacggatgaggagcagaccaatgtgccttacatctacgccattggtgacattctggaggggaagctggagctgacccccgtggccatccaggcggggagattgctggctcagaggctgtatggcggctccactgtcaaatgtgactatgacaatgtcccaacgactgtgtttactcctttggagtatggctgctgtggcctctctgaagaaaaagctgtagagaaatttggggaagaaaatattgaagtttatcacagtttcttctggccattggaatggacagttccatcccgggataacaacaaatgttatgcaaaagtcatctgtaaccttaaagacaacgaacgtgtcgtgggcttccacgtactgggtccaaatgctggagaggtgacgcaggctttgcagccactcaagtgcgggctgaccaagcagcagctggacagcaccattggcatccacccggtctgtgcagagatatttacaacgctgtcggtgactaagcgttctgggggagacatcctccagtctggctgctgaggttaagccccagtgtggatgctgttgccaagactacagaccattgcttgcttccttgtccacacccaggtgaagttcaggaaggctcttgggttcttggcaccaattcaaggtgctatcctaaggccaccaggtccctgggatcttgtgggtaggaggtggcaggtagaagaaggctgcagcatcgcactggggtcaccatgacggactcagactgacattcggcagagcatcacggtgcgtccatgaagtcactagcctcaagcccaagtggtgggcagtgacagaaagctgtcgatctgttgggttcaacctttccctgtagactgttttagtctcgccttcaagctatgtaatgtcaattctgttttttcttttctccatggggttaatgatactagaggtagggaatgttagcaatcagtttttgtcatggctggactatccacagcacggtcgttactgtgtggaagggggtcagatggcttatgagagccaaaccagtttatcctgagaaagacgaattaccctgtggctaaaatacactgtttttactaacctgtgtagcattgtcccctttaataagtttaggtcttctgtccaaactgagaaaaaccatggtcactttggcaaatttccggcagtgtgtgtccctgccgctgcttagcaagggcggcggtgacttggctaatctactcagactcattgcatggctcttgggtatcatggagtattccagcatagagcctgaccagcagtaaatgtctctcctggtacagttactgtctgctggactaagtgcgctgagatggttctcaatggagaatgcttaatttgcttttaacctcttgtttttgtgaggtgggtttagttttaagcttatgtcccataagaactccattcacaggcaagcagctctttccgcacacagcatatgcatcttctgaggtaatggctttataaggaagctgttcataacataagttattattattattgaacacaggtggatgtgaaggattttttttcattgaagaaccaaatggtttttcttttttctgttcagtgagcccacagagaccctggcaggaacagcattgctggcagcattgctgctgggcttttccagtgtagttcttgctcctaggtcacgtgacagcgaacacgatgcctgaggaccgcgcagacaggtttcccaccgcacagccgcccaaggtcccgccatggtccggtagctccttttcttgtcctcccctctgcccatctccacctgcagtactgagtggcgtttcccagtaccctttggggccacctcagggaacgggtttgcctggtattcagccagcggcacccaccctgccccacgaggctccctcagatccgccccacatccgtgtgttgaagaggagaaaggaccagggaaccaaaggagtggactgttgagttttatttatttattttttgtttttttttctcctaagtctgccagtctctgagatcagaacgacagtgtagggtagccgcctaatcatgttgtgattctattggtgggatgaaatgttccgcccccatggaaggagtacactcgtcgtttatgttctgtaatcgcacaatgtactgtaacccaaattccaattccatgtatttttattacagtttctctgggaaaaaaaaatgtgaaacaataaaaaggtgttgattcacgaaaaaaaaaaaaaaaaaaaaaaaaaaaaaaa

SEQ ID NO: 743 - DNA, 3360 bp, Homo sapiens; identical to SEQ ID NO: 742

SEQ ID NO: 744 - DNA, 2599 bp, Homo sapiens
tgctgctggcgtccaagatgtcgaccaagaatttccgagttagtgacggggactggatctgccctgacaagaagtgtggaaatgtaaacttcgccagaagaaccagctgtaacagatgtggtcgagagaagacaactgaggccaagatgatgaaagctgggggaacagaaataggaaagacactggcagagaagagccggggcttatttagtgccaatgattggcagtgcaaaacttgcagtaatgtgaattgggctagaagatcagagtgtaacatgtgtaatactccaaagtatgctaaattagaagaaagaacaggatatggaggtggttttaatgaaagagagaatgttgaatacatagaaagagaagaatctgatggggaatatgatgagtttggacgtaaaaagaaaaaatacagggggaaggcagttggtcctgcatctatattaaaggaagtcgaagataaagaatcagagggagaagaagaggatgaggatgaagatctctctaaatataagctagatgaggacgaggatgaagatgatgctgatctctcaaaatataatcttgatgccagtgaagaggaagatagtaacaaaaagaaaagcaataggcggagccgctcaaagtctcgatcgtctcactcaaggtcttcatcacgctcatcctccccctcaagttcaaggtccaggtccaggtcccgttcaagaagctcttccagctcgcagtccaggtctcactccggttccagagaacattccagatcccgtggttcgaaatcaagatccagctccaggtccacaggggctcttcttccccaagaaaaagatcttactcgagttcttcatcatctcctgaaagagacaggaagaggagtcgctctagaccttcttcaccagctgttcgcaaaaaaagacgaacgagatcacggtcacccgaaaggcaccacaggtcgtctccggatcaacccattctggttcccgttcaagttcaaaaaagaaataatgtattaaaatttacatctttaaaaaacattgagtacagtgcatgaagcatattttttaggaagttgatgtctcatttggtcagaagtactacatctgctagtagaggtgcatgcctttattgcttttcaaaacaataaaactgttcatttgtgaaactgaaagtaaattgcattttaagccatactgttccccagataaatgctctgtccattatttacaaccatttacttcgtttaaaaccatcctagcgataacggagtacttttgtttcctactttaaatcctgtccttttcatttctaaatgttctattggcagagacggttgcctgggcttgcctggacttcagacacataggcaaagctagtaagctagttggagtaaccagttcctgttcatgtgggaatagtagtcaacctggttatgttctttacctatgccagtaatttcttaccagaggtaaagtacattgcaaagctgacaactgggaacaagctgagggtgccttagaatcattgtctcttaccagctttacacctcttaatgcaagaggattatagaaattacagaaggaaagggaaggttaaccacatattacttcaaaatgtctttctcaaagtttaagaaatgtggatatcctttaaataaatctagttaccaaatgttgtacttgattgataaaagatttttaaaaaggctaaatcatagttaatgagccaattgatgagagcttttgaaacttgtttctcagtgacaggctaacaaagacatgaatttaagtgaacatttgccttgtgatgtctgatttttaacattgtagatatctaagtaacagaagaattcttacttccccacaatttaagcaaaatcatttttctcacctggaaaaaaaaacatatggcttaaaatgctttcagagttttatttctcaaattaaaatctggtcacttgagatccattttgttctctggtttaaaagttataaggtttctcttaacagtcttttcagcagcaaaagcaaggtaagtatataagggacaacagttatgctggggctccttgtgagggaattacttcctgtttctcctttagtatttgtctgctgcagtttaaatataagtaaagccttctgagatgtttagtagacagatcaaacgaaatgtttttattttaaagtgagtgtttttcttctcaactgatctaaagatgaaaacaaaatatcgtacgtagaaatattttggtaatatttttacaagctttcctgtgttttttgtcttattttccttgctgcatttactgtaggttgcacacgaactcttactctcttgtaattgtgcctcagacttctcgaaagtcgactttctgagttgcccagatcttctagatccgacgtgttagccttggtttgtttttgtgctttctgtatttaaaacttgagctgtactaggcaaatgcaagattataaatttagctaataggagtttacaaacagttcagatgattatgatttgatttggtttaattgagctgtactagttcatttcataaggaaatgatactgtagacaaatgtaaataaaatctgtgagtc

SEQ ID NO: 745 - DNA, 1723 bp, Homo sapiens
taatgtccagggctccaggaagagatgtccttgtggctggaggccgcagtgcctgatgtttctcctgactctgcaacggagttgtggaagacagaacctcaagatgcaggagaccagggaggcaacacttgcatccttagggaggaagccaggatgccccaatcaactgggggtgctttaaggatagggttggagtcatccgagcctacagccctgctccccagggcagagaccctcccagagcctacagaacttcgtccacagaagcggaaaaaggggccagcccccaaaatgctggggaacgagctatgcagtgtatgtggggacaaggcctctgcgttccattacaatgtgctgagctgcgagggctgcaagggattcttccgccgcagtgtcatcaagggagcacgctacatttgccatagcggtggccactgccccatggacacctacatgcggcggaaatgccaggagtgtcgccttcgcaaatgccgccacgcaggcatgagggaggagtgtgtcttatcagaagaacagatccgcttgaagaaactgaagcgtcaagaagaggagcaggctcaagccacatcggtgtccccaagggtttcctcaccgccccaggtcctgccacagctcagcccagaacaactgggcatgattgagaagttggtggctgcccagcaacagtgtaacaggcgctccttctctgaccgacttcgagtcacgccttggcccattgcacccgaccctcagagccgggaagcccgccaacagcgctttgcccactttactgagctggccatcgtgtccgtgcaggagattgttgactttgccaaacagctccctggcttcctacagctgagcagggaggaccagatcgccttgctgaagacctctgcgatcgaggtgatgcttctggagacatcgcggaggtacaaccctgggagtgagagcatcaccttcctcaaggatttcagttacaaccgggaagactttgccaaagcagggctgcaggtggagttcattaaccccatctttgagttctccagatccatgaatgaactgcaactcaatgatgctgaatttgctctgctcatagccatcagcatcttctctgcagaccggcccaacgtgcaggaccagctccaagtagagagactgcaacacacatatgtggaggccctgcatgcctatgtctccatcaaccacccccacgaccgactgatgttcccacggatgctaatgaagctggtgagcctccggactttgagcagcgtccattcagagcaagtgtttgcacttcgcctgcaggacaaaaaacttccccctctgctctccgagatctgggatgtccacgaatgactgtttctccgtgtcctctgtgttggccacgcagctgaagcttactgactgcttcctagaggtggagcagactgaggagggcaaacattcctgggcgctgggtgaaagagacccttgcatggcactaaagagagtcaaagggttgggtgttttgtggctgctgggcagttggggacctactaacgttgtatgccatctgaaggccttgttgacccaaccaaataaactagccaggagagccactttgtgcagggttcttcaggccctgcccaaaaaaaaaaaaaaaaaacgactaacgttgtatgccatctgaaggccttgttgacccaaccaaataaactagccaggagagccactttgt

SEQ ID NO: 746 - DNA, 831 bp, Homo sapiens
ggcacgagtgactaagatggaagcgttttgggagtcacggactggccactgggcggaggtccggggcagttttaccggcgtcccgtcacccccagctgcctcatggatccgatgtctgcgcctgcgaggtccatcactcggacccagaatccgatgctgactgggacatccgtactaggggtgaagttcgactgcggagtggtgattgctgcagacatgctgggctcctacggctccctggctcgtttccgcattatctctcgtattatgcgagtcaacgacagcactatgctaggtgcttcaggagactatgctgatttccagtatttgaagcaagttctcggccagatggtgattgatgaggagctgttcggagatggacatagctatagtcctagagctatccattcatggttgacaagggccatgtacagtcgccgctccaagatgaaccctctgtggaacaccaaggtcattggaggctatgctggtggagaaagctttcttggttatgtggacatgcttggtgtagcttatgaagccccttcactagccactggttatggtgcatacttggctcagcctctgcttcgagaagttctagagaagcaaccggtgctgagtcagacagaggcccgagagcttgtggagcgctgcatgcgagtgctgtactaccgagacgctcgttcgtataaccggtttcaagttgctactgtaactgaaaaaggtgtggagatagaaggaccactgtcagcacagaccaactgggacattgctcacatgatcagtggctttgaatgaaatccagatgaagtgtccagagttaagctt

SEQ ID NO: 747 - DNA, 1778 bp, Homo sapiens
gagttgcggttgctgctctgcagaacctcgtgaccaggtattccgatttggagtccttgaattaaaaacaaccatggagcatgtcattggagacagcaagaagaaaagaaactagggacaatgaggttccttttcttcctgttcgttgctgttgttcaccttttctccttgggctctggaaaagctatatacaagagtggtgtttctcagcgaacatttcaagaaataaaagaagaaatagccaactatgaagatgttgctaaagcaattatcaaccttgctgtttatggaaaataccagaaccggtcgtatgagcgtttgggacttctagttgatactgttggacccagactgagtggctctaagaacctagagaaagctatccaaatcatgtaccaaaacctgcaacaagatgggctggaaaacgtccacctggagcaggtcagaatacctcactgggggaggggcgaagaatctgcagtgatggtggtgcctcgaattcacaagttggctattttaggccttggcggcagcattgggactcctcctgaaggtatcacagcagaagtactcgtggtggcctcttttgttgaacttcaaagaagggcatcagaggcaagagggaagattgttgtttataaccagccttacactgactatgggaaaactgtgcagtaccgggagcgcggagctgtggaagctgccaaggtgggggccgtggcatccctcatccgatcagtagcttctttttccatctacagtcctcacacaggtcatcaaggatatcaagatggtgtgcccaagattccaacagcctgtatcacaatagaagatgcagaaatgatgtctcgaatggcttctcgtggggacaaaattgtcattcatctgaaaatgggagcaaagacctatccagatacagattccttcaacactgttgcagagatcactgggagcaagtatccagaggaagttgtcctggtcagtggacatctggacagctgggacgtcgggcagggtgcactggatgatggcggtggagccttcatatcatgggaagcactctcacttgttaaagatcttgggctgcgtccaaagaggactctgcgcttggtgctctggaccgcagaagaacaaggaggggttggtgcctcccagtattatgagctacataaggcaaatatttccaagtacagtttggtgatggaggctgactcaggaaccttcttacccactgggctgcagttcaccggcagtgacaaggccagggctatcatgaaggaagtcatgagtctcctgcaacccctcaatatcaccaaggtctttaatgatgcagaaggaactgacattaacttctggatccaagctggagtgcctggagccagtctgcgagatgacttgtacaagtatttctttttccatcattcccatggagacaccatgactgccatggatccaaagcagatgaatgttgctgctgctgtttgggctgttgtcgcttacgttgtggcagacatggaggaaatgctgcccaggtcctaaggaaaacaagaaggaagaaccttgttctctgcagctgggaatccccattcgggattttcacagcagccatcttcacagcaccttgttatacactcaatccccgtggcacagtttctttataccttctgttaaccatctttccttgatacgcttttacctgttctagaataagtaatcatcactactgtaccaccttgaaaatactgtttccagtttaaaaataaacaataaatatatga

SEQ ID NO: 748 - DNA, 279 bp, Homo sapiens
atggcacctctccaccacatcttgattgtctgtgtgtgtctcctctccatggccagtgcagaagctccgcaggaaccagatccattcacctacgattaccacaccctgcggatcggcggcctcactgctgggatcctcctcttcatcttgggcatccttatcatccttagcaaaagatgccggtgcaaattcaaccaacagcagagaactggggaacccgacgaagaggagggaactttccgcagctccatccgccgtctgtccacccgcaggcggtaa

SEQ ID NO: 749 - DNA, 279 bp, Homo sapiens; identical to SEQ ID NO: 748

SEQ ID NO: 750 - DNA, 2707 bp, Homo sapiens
gcgtacctgctgtgggctgagacccaattttcctggggccaatctctgcttacgcctgctgtgccctctccgcggtcctgcctgaagtttgccctaacgcacaatggaaggtcctcgctcagacgtgggccgctggggtaggagcccctggcagcccacgacaccgtcgccagagccagagccagagccagagccagacagaagctcgcgctcccgccgaggaggaggccgctccttctgggctcgctgttgtggctgctgctcctgcgggaacagagctgatgatgactggggacccgaaccttctggctccagaagccgagggaccagctcccggggtggaggctcccggggtggggactctcggggtagggactctcgaggtggccgaagacctgagtctcggggcagtggtgtgaatgcagctggagatggcaccatccgagagggaatgctggttgtgaatggtgtagatctgctgtgctcgcgatcagaccagaaccgccgagagcaccacaccgatgagtttgaatatgacgagctaattttgcgccgtgggcagcccttccacataatcctcttcctgaaccgggagtatgagtcctctgatcgcattgcccttgagcttctcatcggaaacaatcctgaggtgggcaagggcacccacgtgatcatcccagtgggtaagggaggcagcggtggctggaaggcccaagtgactaagaccaatggacacaacctaaccctgcgcgtccacacctcccctaatgccatcattggcaagtttcaattcactgtccgtacacgctcagaggctggcgagttccagctgccctttgacccccgcaatgagatctacatcctcttcaatccctggtgtccagaggacatagtgtatgtggaccacgaagactggcgacaagaatatgtgcttaatgagtctggaagaatctactatgggacagaagcacagattggcgaacggacctggaattatggccagtttgaccatggggtgctggatgcctgcctgtacattctggatcggagggggatgccatatggaggtcgcggggacccagtcagtgtctctcgggtcgtctctgccatggtgaactccctggatgacaatggagttctgattgggaactggactggcgactactctcgaggcaccaatccctcagcgtgggtgggcagtgtggagatcctgcttagctacctacgcaccggctattccgtcccctatggccaatgctgggtctttgccggtgtgaccaccacagtgctccgatgtctgggccttgctacccgtactgtcaccaacttcaactctgcacacgacacggacacgtccctcactatggacatttattttgatgagaacatgaagccactggagcacctgaaccacgattctgtttggaacttccacgtgtggaacgactgctggatgaagaggccagatctgccctcaggctttgatgggtggcaggttgtggatgccacaccccaggagaccagcagtggcatcttctgctgtggcccctgttcagtggagtccatcaagaatggcttagtctacatgaagtatgacacacctttcatttttgccgaggtaaacagtgataaggtatactggcagcggcaggatgacggcagcttcaagatcgtgtatgtggaagagaaagccattggcacactgattgtcacaaaggcgatcaactccaacatgcgagaggacatcacccacatctataagcacccagaaggctcagaagcagagaggaaggctgtggaaaaggctgcggcccatggcagcaaacctaatgtgtatgccacccgggactctgctgaggatgtggcaatgcaggtggaggcacaggatgctgtgatggggcaggatctgactgtctctgtggtgttgaccaatcgtggcagtagccgacgcactgtgaagttgcacctctacctttgtgtcacctactacactggtgtctctgggcctaccttcaaggagaccaagaaagaagtggtattagccccaggagcctcggacactgtggccatgcctgtggcctacaaggaatacaagccccaccttgtggaccagggggcaatgttgctcaatgtctcaggccatgtcaaggagagtgggcaggtactagccaagcaacacaccttccgtttgcgcaccccagacctctctctgacattactgggagctgcagtagttggccaggaatgtgaagtccagatcgtgttcaagaaccccctgcctatcaccctcaccaacgttgtcttccggctcgaaggttctgggttacagagacccaaggtcctcaatgttggggacatcgggggtaacgagacggttacactgcgccagacatttgttcctgtgcgaccaggcccccgccagctcattgccagtctggacagtccacagctttcccaagtacacggtgtcattcaagtggatgtggccccatcctctggaggcagaggtttctcagaggctgtaggtgacagtcgctccggggagaacatacctatggcatttcgaggtggagcttagccctgggccaggagcaataggactgaaatcagatgaacaaggacattgccccaagatggggtcctaccataaagtagctcccctggctcggacaagaaggctggggcacccggggaggctgttactctt

SEQ ID NO: 751 - DNA, 3834 bp, Homo sapiens
atgaaatatgccctgaagcgcctaatcactgggcttggggtgggccgagaagctgctaggccctgctacagtctggcgctagcacagctgttgcagtcttttgaagacatccagttgtgtgacatcctgggacagatacaagaaaaatacaatctacaagcaatgaacaaggcaatgatgagacctactctctttgcaaacctgtttgcagtgcttgccctctttcagtcaggacgcctagtgaaggataaagaagccctgatgaagtgcgtgagattgctgaagatattgtcccatcactacaaccacttacaggggcagccagtaaaggctctggtggacatcctctccgaggtcccagagtccatgttccaggagatcctgccaaaggtcctcaagggggacatgaaagtgatcctcagctctcccaagtacttggagctcttcctcttggctcggcagagggtgccagcagagctcgagtcactggttggctcggttgatctgttctcagaagacaacattcccagtctggtgaatatactgaaggtggcggccaactctgtaaagaaggagcagaagctgcctgatgtggctctgaacctgctccgcctggcacttcaggagaacaaatttgaacggttctggaaggaggttttggaggaggggctgctgaagaagccatcctatacatccagctacatgtgtttccgcctactgggtgcatctctgccgcttctgtcagatgagcagttgcagttggtgatgcgaggagacttgatccgacattttggggagcacatggtcgtttctaagtcccaaaacccgctaaggttcattccagagataagtgcatatgtgggtaccttcctcgaggggtgccaggacgatcccaagcggcaattcactgtgatggtggccttcacggccatcaccaatcaaggtctccctgtcatgcctaccttctggcgtgtcacgcggttcttgaatactgaagccctgcagaactacgtgacctggctgcgggacatgttcctgcagcctgacctggactccttggttgacttcagcactgccaaccagaagagagttcaggacgcctccttgaatgtgcctgagcgaacagtattccggctccggaagtggatcatccaccgcctggtcagccttgtggatcatctgcacctggagaaggatgaagctgtggtcgagcaaatagccaggttttgcttgttccatgccttctttaagacaaagaaagctactccccagatcccagagacaaagcagcacttctccttccccttggaggacggcaaccgtggggtcattgtcagtgccttcttcagcctactgcagaccctcagtgtgaagttcagacagacaccagacctggctgaaaatgggaagccctggacttaccgcctggtgcagctggcagacatgctgttgaagcataaccgcaacgtagccaatgtgacacccttgacagcacagcagcgtcaggcctgggaccagatgatgagtacgctgaaggaactggaggcccagtcctcagagacccgggccattgccttccagcacctgctgcttctggtgggcctccacctcttcaagtcccctgcagaaagctgtgacgtcctaggagacattcagacttgcatcaagaaaagcatggagcagaatctgcgccgatcacgctctagagccaaagcctcccaggagccagtgtgggtggaggtgatggtggagatcttgctgtccttgctggctcaacccagtaacctgatgcgccaggtggtccggagtgtttttggtcatgtctgttcccacctgactccacgtgggctacagctaatcctggctgtgctcaaccctgagacaaatgaggatgaggaggacaacgtggtggtcactgacactgacgagaagcagctgaaacatggagaggacgcagactcagacagtgaggacagtaagaactcagagagtgacgtggatagtgaggatggggaagaaagtgaagaggaggaccgtgataaggatgtggacccaggcttccgacaacagctgatggaagtgttgcaagctgggaatgcactgggtggagaggaggaggaggaggaagagcttggggatgaggccatgatggccctggaccagaacctggccagcctatttgcagagcagaagatgcgtatccaggcccggcatgaggagaaaaacaagctgcagaaggagaagcagctccgacgagacttccagatcagggcactagacctgattgaggtgctggtgaccaagcagcctgagcaccccctgatcctggaacttcttgagccactgctaaacatcatccagcgcagcatgcgcagcagaggctccaccaagcaggagcaggacctcctgcacaagaccgcccgcatcttcatgcatcatctttgtcgtgcccgccactactgccacgaggtggagcctggcgcagaggctctgcatgcccaggtggagaggtttgtgcagcaggctggcaaccaggctgacgcctctgttgccctttactatttcaatgcctctctgtacctgctgcgagtcctcaagggcaacaccactaagaggtaccaagacggtcagaagttagagggagcagacatcaagtctgaacccaaggactcagaggtccagactaccagttgcttggacttggactttgtgacccgggtgtattcagcgtcattggaatctcttctgaccaagcgtaacagcccactcaccatccccatgttcctcgacctcttctcccgatatccagtgatctgtaagaacttgcttcccatcgtggtccagcatgtggctggctcatctcggccccgccatcaggcccaggcgtgcctgctgctccagaaggccctgtctgcacgggagctgagagtgtgttttgaggatcctgagtgggagcagctgattagccaggtcttgggaaagaccacccagaccctgcagactcttggggaagcacagagcaaaggggaacaccagagggagctatccatcttggagctgctgaacactgtcttcaggatagtcaatcacgagaagctgtctgtggacctcactgctttcttgggcatgcttcaaggcaagcagcagaagctgcagcaaaacctgcagcaagggaatcactcgtctggctccagtcgcctctacgatctctactggcaggccatgaacttgcttggagtgcagcgtccaaagtcagaaaagaagaatgtgaaggatattcctagtgacagccagagtcccattagcacaaagcggaagaaaaagggattcttgccagagaccaagaagcgaaagaaacttaaatctgagggtaccacatcagaaaagaaggctgcatcacagcaggatcgagtgacagagggtgccatgcctgctgccactggtaaagaccagccccccagcacaggcaagaaaagaaggaagagagtgaaggctaacaccccatcccaggtgaatggagtaactgtggccaagagtccggctcccaataaccccaccctgagtcccagcaccccccctgccaagaccccaaaagtgcagaagaaaaaagagaagctgtcacaggtgaatggatccactcctgtgtcccccgtagagcctgaaagcaaaaagcatcagaaggctctcagcacaaaggaggtcaaaagaaggtcctcccagtctgccctgccaaagaaaagagcaaggctgtctctggtgagcaggagccccagcctgttacagagtgggatcaggaaaaggagagtggccaggaggagagtccagacaccttga

SEQ ID NO: 752 - DNA, 3834 bp, Homo sapiens; identical to SEQ ID NO: 751

SEQ ID NO: 753 - DNA, 2142 bp, Homo sapiens
gtggcggctactctcgctcgccctgtgccagagactggtcggctccggccttggcagcggcccccaccccaagtgcctaggaggatgcttggctgacacacagagaacctcagctaatactccttgaaaccaacagaaggaaccttctgctttcatctggaggacccagcgttctgcctgagcgtgagctaggacccccctcccagggaacgcccaggtgccttgggctttcgccctcctgccaacatcgagtctccaagttcgcaagagccagagggaaggagctgccaaccaggcacagcggagaacactggaaccatgacaaccagtcaccagcctcaggacaggtataaggctgtctggctcatcttctttgtcctgggtctggggacactgctcccctggaatttttttataacagcaacccagtatttcacaagccgcctgaacacgtcccagaatatatccttggtcaccaaccaatcatgcgaaagcaccgaggccttggctgacccctcagtgtccttgccagcccggagttctctcagtgccatcttcaacaatgtcatgaccctgtgtgccatgttgcccttgctgatcttcacctgcctcaactctttcctgcatcagaaggtgtctcagtcccttcggatcttgggcagcctgctggctatcctgttggtgttcctcgtcactgccaccctggtgaaggtgcagatggatgccctgtccttcttcatcatcaccatgatcaagattgtgctcattaactcatttggtgccattttgcaagccagccttttcggtctggcaggcgtcctgccggccaactacacagcccccatcatgagtggccagggcctggctggcttcttcacctctgttgccatgatctgtgccgtcgccagtggctctaagctgtcagaaagtgcttttggttacttcatcacggcctgtgcagttgtcattctggccatactgtgttacctggccctgccttggatggaattctaccgacattacctgcagctcaaccttgcggggcctgcagagcaggagaccaagttggatctcatcagtgaaggagaggagccaagaggaggaagagaggaatctggggtgccaggccccaactctctacccgccaacagaaaccaatccatcaaagccatactgaagagtatctgggtcctggctctgtctgtctgtttcatcttcacagtcaccattgggttgttccctgctgtgactgctgaggtggaatccagcatcgcaggcacaagtccctggaaaaactgctacttcatccctgtggcctgcttcctgaatttcaatgtctttgactggctaggccggagcctcacagctatttgcatgtggcctggtcaggacagccgctggttgccggtcctggtcgcctgcagggttgtgtttatccccctgctgatgctctgcaatgtgaagcagcaccactacctgccctccctctttaagcatgatgtctggttcatcaccttcatggccgcctttgccttctccaatggctacctcgccagcctctgcatgtgcttcgggcccaagaaagtcaaaccggctgaggcagagactgccggaaacatcatgtccttctttctgtgtctgggcctggctctgggagctgtgttgtccttcttgttaagggcacttgtgtgagcgaccctgtgtggacagaggaactacactgcctgcttcctgctcacttccttcgctgttagggacgagcaggggtccagagggctgctcttctgctttcctccggtgctgggcccagatgtccaggaacaaaggagggagcctctgaggatggacttgggattgggggtcagagtggtagggggacaatggtctctgacggacagctctgactgatccctgcctaagccaagcacaagagactccacaaggatggggtggagacagatggctgactgtgtatcatgatctgatgtcccttgcccttctttcttctgtgcctgttccaggtccccgatccttgtcattttactgccttttttatactgacagaaaccaggtgccttcagaggccatctgattaaataaacatttttttcctccaaaaaaaaaaaaaaaaaaaaaaaaaaa

SEQ ID NO: 754 - DNA, 608 bp, Homo sapiens
ggggctctttctcttcaacgaggcggccgagcggcagacgccaacatgcagatcttcgtgaagaccctgacgggcaagaccatcactcttgaggtcgagcccagtgacaccatcgagaatgtcaaggccaagatccaagacaaggaaggcatcccccctgaccagcagagactgatctttgctggcaaacagctggaggatggccgcaccctgtccgactacaacatccagaaagagtccaccttgcacctggtgctgcgtcttcgcggtggcatcatcgagccgtcccttcgtcagcttgcccagaagtacaactgtgacaagatgatctgccgcaagtgctacgcacgcctgcacccccgtgcagtcaactgccgcaagaagaagtgcggccacaccaacaacctgcgccccaagaagaaggtcaaatagagctgggccatacctggcctgtgaccccgggaccaaataaagtccccttccatcgactggagcagtaaaaaaaaaaaaaaaaaaaaaaaaaaaaaaaaaaaaaaaaaaaaaaaaaaaaaaaaaaaaaaaaaaaaaaaaaaaaaaacaaaaaaaaaaaaaaaaaaaaaaaaaaaaaa

SEQ ID NO: 755 - DNA, 2234 bp, Homo sapiens
ctcggaggaatggcgccgccgggttcaagtgctgtcttcctgttggccctgacaatcacagccagcacccaggctctgacccccacccactacctcaccaagcatgatgtggaaagactgaaagcctcactggatcgccctttcacgagcttggagtctgccttctactccattgtgggactcaacagccttggggcacaggtgccagatgtcaagaaagcgtgtgccttcatcaagtcaaaccttgatcccagcaacgtggattctctcttctatgctgcccaatccagccaagtcctctcaggttgtgagatatctgtttcgaatgagaccagagatctgcttctggcagcagtcagcgaggactcctccgttgcccaaatctaccatgcagttgccgccctcagtggctttggtcttcccttggcatcccatgaagcccttggtgcccttaccgctcgcctcagcaaggaggagactgtgctggcaaccgtccaggctctgcacacagcatcccacctatcccagcaggctgacctgaggaacattgtagaagagatcgaggaccttgttgctcgcctggacgaactagggggtgtgtatctccagtttgaggaaggcctggaacttacagcattgtttgttgctgccacctacaagctcatggaccatgtggggactgaaccgtccatcaaggaggatcaggtcatccagctcatgaacacaatcttcagcaagaagaactttgagtccctctcagaagccttcagtgtggcctctgctgctgctgcattgtcccagaatcgctatcacgtaccagtggtggttgttcctgagggctctgcttctgacactcaagaacaggctatcctgcggttgcaagtcagcagtgttttgtctcacgctctggctcaagccgcagttaagctggaacatgctaagtccgtggcttccagagctactgtcctgcagaagatgcccttttcacttgtaggggatgtttttgagctaaacttcaagaatgttaaacttcccagtggctactatgacttctctgtcagagttgaaggtgacaaccgttacattgcaaacactgtagagcttagagtcaagatctccactgaagttggcatcaccaatgctgatctttccactgtggacaaggatcagagcatcccacccaaaactacccgggtgacctacccagccaaagccaagggcacattcatcgcagacagccatcagaacttcgccctgtttttccagctggtagatgtgaacaccggtgcggagctcacccctcaccagacatttgttcgacttcataaccagaagactggccaggaagtggtgtttgttgctgagccggataacaagaatgtgcataagtttgaactggacacctctgaaaggaagattgagttcgactctgcctctggcacttacacactctacctaatcatcggggacgccactttgaagaaccccatcctctggaacgtggctgatgtggttatcaagttccctgaagaagaagctccctccactgtgctgtcccagaacctttttaccccaaaacaggaaattcagcacctgttccgagagcctgagaagaggccccccactgtggtgtccaatacattcacggccctcatcctctcgcccttgctcctgctctttgcactgtggatccggattggagccaatgtctccaacttcacctttgctcctaccacgattatctttcacctgggacatgctgcaatgctggggctcatgtatgtctactggactcagctcaacatgttccagaccctgaagtacctggccgtcctgggcactgtgacatttctggctggcaaccgaatgctggcccagcaggcagttaagagaacagcacattagttccagaagaagtttgaagaccctgaactcggaaatgaccgtttaacaaagagtggagacagttcagagtgtggaaagaatcgggggacagaataggagaagaggaaatacctgttatttaaagagagaaaagtcgagctatgcttacacgtttacttgtttctcactttttgcttcactgaacagatatgtttggacccagattgtctgtccctttgttgtgatgcctggccagattctgtgaatatcccaggttacccagaggttgtatttgaaaagttgaaatctgtaattcatcagctttggaataaagagaatggtggactccc

SEQ ID NO: 756 - DNA, 2091 bp, Homo sapiens
attttcaagggccagcgagagagggagtttggcacagtttgtggagaactcaaagaaaaaccaactctgttcgcagtccccagctcctccagccatggcaccacaagaacgacttctcatccgcgggggtcgcgtggtcaatgatgacttctcacaggtggccgacgtgctagtggaggacggcgtggtgcgggcgctgggacgggacttgctgcctcccggggacacatcccgggggctgcggatcctagatgcagcgggcaagctcgtcctgccgggaggcatcgacacacacacgcacatgcagttcccgttcatgggctcgcagtcagtcgacgacttccaccagggcaccaaggctgctttggcaggaggcaccaccatgatcattgattttgcgattcctcagaaaggcagctccctcattgaagcttttgagacctggcgcaactgggcagaccccaaagtctgctgtgactatagcctgcacgtggcagtgacatggtggagtgacaaggtaaaagaagaaatgaaaacccttgcccaagataaaggcgttaactctttcaagatgtttatggcctacaaagacctgtacatggtgcaagaccagcaaatgtacgctgccttttctcagtgcaaggagataggggccattgctcaggtgcatgccgagaatggagatttgattgcagagggggccaagaagatgctggcactggggataacgggccccgaggggcacgagctgtgccgcccggaagcagtggaggcagaggccaccttgagagccatcaccattgctagcgctgtgaactgccctctatacatcgtgcacgtgatgagcaaatccgcagcgaaggtgatagctgatgcgaagagagaaggaaaggtggtctatggagaaccaattgcagcaggtctgggcacggatggcactcagtactggaataaagaatggcgccatgcagcccaccatgtcatgggtcccccactgagacctgatccatcaacgcctggctttctcatgaatctgttggctaatggcgatctgaccacaacagggagtgacaactgcactttcaacacctgccaaaaagctctagggaaggatgacttcactaagattcccaatggggtgaatggtgtcgaggacaggatgtcggtgatatgggaaaagggcgtgcacagtggcaaaatggatgaaaatagatttgtggcagttaccagcacaaatgcagccaaaatctttaatctttatccgaaaaaaggaagaatagctgtaggctcagatgctgacatggtgatctgggacccagaagccaccaggacgatctcagccaaaacacatcatcaggccgttaacttcaacattttcgagggcatggtttgccatggggtgcccctggtgactatttcaagaggcagagtggtgtatgaagcaggcgttttcgacgtcacagcaggacacgggaagtttattccgcgacaacctttcgctgagttcatttacaaacgagtcaagcagcgagaccagacctgcacacctataccggtgaagcgtgcgccctacaagggagaagtcatcacattgaaacccagagagacaaaagaagacgacacagctgggaccaggatgcagggccattcctgatttggatgctggggttaagcaagtgcaaacagagtgaaggctcccaggctcccctccccaccatgctgccaagccctggagaagcacctgccatttcaactctccaagatcctttaggaaaaattcatcgctctaggcctctttgatttttctctcagaagcaatagcagcctgcctcaccctgcctttgttgctgtggaagattgaggatataaatgaacattattgggatgaaacgtctgcatgaagattcattgaagattcctttttcaaatgccatctctccttaccctagatttctttctttgggtttttaaagatttccttctggtgtaaaggttttgtttgtttgttttgttttaatgtttatgtttgttttaaaaatcagtgattttacatttcattgcaactaataaacatctggagcttcattctgc

SEQ ID NO: 757 - DNA, 2091 bp, Homo sapiens; identical to SEQ ID NO: 756

SEQ ID NO: 758 - DNA, 696 bp, Homo sapiens
ctctttccagccagcgccgagcgatgggcatctctcgggacaactggcacaagcgccgcaagaccgggggtaagagaaaaccctaccacaagaagcggaagtatgagctgggacggccggccgccaacactaagattggccctcgccgcatacatacagtccgagttcgaggaggcaataagaagtatcgtgctctgagattggatgtggggaacttttcctggggctcagagtgttgtactcgcaaaacaaggatcattgatgttgtctacaatgcatccaataacgagcttgtccgcaccaagaccctggtgaagaactgcattgtgcttattgacagcacaccgtaccgacagtggtacgagtcccactatgcactgcccctgggccgcaagaagggggccaagctgactcctgaggaggaagagattttaaacaaaaaacgatcaaagaaaattcagaagaaatatgatgaaaggaaaaagaatgccaaaatcagcagtcttctggaggagcagttccagcagggcaagcttctcgcctgtattgcctcaagaccaggccagtgtggcagagcagatggctatgtgctcgaaggcaaggagctggagttctatctgcggaagatcaaagcccggaaaggcaaataaactgtcatagctcgtgtaataaaggtgtttgctgttctgtatatgt

SEQ ID NO: 759 - DNA, 499 bp, Homo sapiens
tgttttcccctgccgccgccaagttccgcggagaagctccggggtgcgttcaagattcggcgtcacccgtaatccaccgccatggccgaggaaggcatagctgctggaggtgtaatggacgtcaacactgctctacaagaggtgctgaagaccgccctcatccacgatggcctagcacgtggcatacgcgaagctgccaaagccttagacaagcgccaagcccatctctgcgtgcttgcatccaactgtgatgagcccatgtatgtcaagctggtggaggcgctcttggccgagcaccagatcaacctgataaaggttgatgacaacaagaaactaggggaatgggtaggcctctgtaaaatcgatcgagaggggaagccacggaaagtggttggttgcagttgcgttgtagttaaggactatggcaaagaatctcaggccaaggatgtcatcgaggagtacttcaaatgctagaaatgaataaataaaattttggctc

SEQ ID NO: 760 - DNA, 917 bp, Homo sapiens
cacgaggttgttactgccgtttcttctctggaggatcttcaagagggaaggattagcatgtcgtcaataatcagaaaagtgatcagcacttcaaaagccccggcggccattggtgcctacagccaagctgtgctagtggacaggaccatttacgtttctggacagataggcatggatccttccagtggacaacttgtgccaggaggggtagcagaagaagctaatcaagctcttaaaaacctgggtgagattctgaaggctgcaggctgtgacttcactaatgtggtgaagacaactgttttactggctgacataaatgactttggcactgtcaatgagatctacaaaacatatttccagggtaaccttcctgccagggctgcttaccaagtcgccgctttacccaaaggaagtcgaattgaaatcgaagccatcgctgtccaggggcctttcaccacagcaggactgtaaggagccatgctgatgctgactctggagtctttacaatgtctctcacactttaaatttaacaaatgattgctgggaagtgcacacatgaccgtgtgaagtgatcgtgggaatgatcatacatgtggagatttgacattaattggggattattcagtacagtggctagtgctgtaatttcacttatgtggctgggtgtgagagaaaggcacatagctgctaacatgcagagcagaatcatagacgaaacagtaaagagcacacctaattaaatcatatcaatttgcttgtgtggaatacttagttctcatgttagatatcagaaactaaattaaaatattcaaactttaatagtaccaggagaaaaaagtggacccaaatcttataagataatactgccttaatggaataaaaaacagatgtgtaaaaaaaaaaaaaaaaaactcgag

SEQ ID NO: 761 - DNA, 1363 bp, Homo sapiens
aacctgtcaagtccccattctaagatgtccttggaaaaaatgaaagaccttcaccttggtgaacaggacctacagccagaaaccagagaagtgaatgggattctcatgtccaagttgatgagtgataactgggacaaaatctggaacttccaagcaaagcctgatgatctccttattgcaacctatgcaaaagcaggtaccacctggacgcaggaaattgtggacatgatccaaaatgatggggatgttcaaaaatgccaacgggccaacacctatgaccgacatcctttcattgagtggactttgccttcacccctcaactcaggtctggatctggctaacaaaatgccatcacctagaaccctgaagactcatctgcctgttcatatgctgccaccttccttctggaaagaaaactcaaaaattatctatgtggccagaaatgccaaggactgcctggtatcttactattacttctcaagaatgaataaaatgctgcctgaccctggtaccctgggagaatacattgaacagttcaaagctggaaaagtgctgtggggctcctggtatgaccatgtaaagggatggtgggatgtgaaagaccaacaccgtattctgtatctcttctatgaagacatgaaagaggaccctaaaagagaaattaagaagatagcaaaattcctggaaaaagacatatcagaggaagttcttaataaaatcatctaccacacctcctttgatgtaatgaaggaaaacccaatggccaactataccactctaccctccagtatcatggaccactctatatctcctttcatgaggaaagggatgcctggagactggaagaactactttactgtggcacaaagtgaggattttgatgaagactaccggaggaagatggcagggagcaatattaccttccgcacagagatctgagagcagtgaggaagagagaagccctagatttcctgactatatgctttagctatttgagcttcattcctgagttttgtatgtcctgtgatactatttcatcaaaatgtaatcagaccttccacactaggtgattatccttattgatacctactatacaaccatgcacttttactgcacttacgcaaataacagataccttcactagcctgtaattgtcttgtttcacggcaaatctcatgaatagagagacacacaaaacaggttagacataagaaagtaaataagaaaagccaaacgaatgagaagtgagcactgtgcattaaccaaaggctatttaattttcttaacaattgtcttcatctgttctctttaacgaaatacctaatttgtttataaagaataaaaatgatttcttatgcaaaac

SEQ ID NO: 762 - DNA, 1363 bp, Homo sapiens; identical to SEQ ID NO: 761

SEQ ID NO: 763 - DNA, 861 bp, Homo sapiens
gaattcggcacgagcgcgctcgggtggggccgcctaggtgctgctgggctcggggatatttacagcggttctattcactgcagcgcgaacatggcggcccagaaggaccagcagaaggatgccgaagtggaagggctgagcgccacgaccctgctacccaagctgattccctctggcgcaggtcgagagtggctggagcggcgccgtgctaccatccggccctggggcaccttcgtggaccagcaacgtttctcgcgaccccgcaacgtaggcgagctttgccagcgcctggttcgcaacgtggagtattatcaaagcaactacgtgtttgtgtttctgggcctcatcctgtactgcgtggtgacatcccccatgctgctggtggctctggctgtcttctttggcgcctgttacattctctatctgcgcacgttgcagtctaagcttgtgctctttggccgtgaggtgagcccagcacatcagtacgccctggctggtggtgtctctttccctttcttctggctggccggtgctggctccgctgtcttctgggtcctgggagccaccctggtacttataggctctcacgctgccttccaccagatagagcctgcagatggtgaggaactgcagatggaacctgtgtaaagtgtcctccaggacctgccagcctctcctgccggcctctcctgcccgtggctgtcccctctctgtctgttcttgccctacctgacctagacactcagctcaactcagagcctaactctgagccttccaccctagacctcaaacccggggagaggcttttatcttcggaaataaaacagttacaattgaaaaaaaaaaaaaaaaaaactcgag

SEQ ID NO: 764 - DNA, 948 bp, Homo sapiens
aacagctagcggagcggcaggaggagcactaaccaggaaaatggcagacggcttctcacttaatgatgccttagctggctctggaaacccaaaccctcgaggatggcctggtgcatgggggaaccagcctggggcaggaggctacccaggggcctcctatcctggggcctacccaggacaggctcctccagggggttatcctggacaggctcctcctagtgcctatccgggcccaactggccctagtgcttatcctggcccaactgcccctggagcttatcctggcccaactgcccccggagccttcccagggcaacctgggggacctggagcctaccccagtgctcctggggcctaccccagtgctcctggggcctatcctgctactggcccctttggtgccccgactggaccactgacagtgccctacgatatgcccttgcctggaggagtcatgcctcgcatgctgatcacaatcataggcacagtgaagcccaacgcaaacagtatcactctgaatttcaagaaagggaacgacatcgccttccactttaacccccgcttcaatgagaacaacagaagagtcatcgtgtgcaacacgaagcaggacaataactggggaagggaagaaagacagtcagctttcccctttgagagcggcaaaccattcaaaatacaggtcctggttgaagccgaccacttcaaggttgcggtcaatgatgttcatctgttgcagtataaccatcggatgaagaacctcagggaaatcagccaactggggatcattggtgacataaccctcaccagcgcttcccacgccatgatctaagccagaaggggtgggccggcaccagaactgccctgtgtgttatgagcgggaaactttgcatttctctctccttatacttcttgtaagacatccatttaataaagtctcgtgctgagaga

SEQ ID NO: 765 - DNA, 1227 bp, Homo sapiens
ggaattcgcaacgcctacacaaagatccctatcactgagcacccggaggcaaggctcagaaccccaggatcagcaacatggagttctcccgtccaccgctagtgcatgtgaagggtatcccactcatcaaatactttgcagagacaattgggccattgcagaacttcacagcctggcctgatgacttgctgatcagcacatacccaaagtctggtactacctggatgagtgagatcctggatatgatctatcagggtggcaagctagagaagtgtggccgcgcccccatctatgcccgggtacccttccttgagttcaaatgtccaggggttccctcaggtcttgaaactttggaagagacaccagccccacggctccttaagacacatctgcccctgtccttgctccctcagagtctgctggatcagaaggtcaaggtgatctacattgcccgaaatgcaaaggatgtggttgtctcctattataacttctacaacatggccaagctgcaccctgatccaggcacctgggacagcttcttggagaacttcatggatggggaagtgtcctatgggtcgtggtaccagcacgtgaaggagtggtgggagctgagacacactcaccctgttctctatctcttctatgaagacataaaggagaaccccaaaagggagatcaagaagattctagagtttttggggcgctctctacccgaggagactgtggattccattgttcaccacacatctttcaagaaaatgaaagagaactgcatgactaactacacaaccatccccactgagattatggaccacaatgtttctcccttcatgaggaaaggtactactggggactggaaaaataccttcactgtagcccagaatgagcgctttgatgcccactatgctaagacaatgacagattgtgacttcaagtttcgttgtgaactatgagtggattatggctatactgggaaccaaggcaaactgacacagcccatcatgatctcaagtaaaatgtgatgtgttcaatctacttgttgtatgcctagaggaaatctgagctaagagaataggattggggatgtggctgaggcagagggttttatcaacgcatgtcaggaaagcaatcagtcccaacacctaaaaagaacctaaagtacaaacatgcaaaaaatagtaagataaactatattttacctgaaagaataaatgccactgggaaatg

SEQ ID NO: 766 - DNA, 1227 bp, Homo sapiens; identical to SEQ ID NO: 765

SEQ ID NO: 767 - DNA, 645 bp, Homo sapiens
atgaactttctgctctcttgggtgcactggaccctggctttactgctgtacctccaccatgccaagtggtcccaggctgcacccacgacagaaggggagcagaaagcccatgaagtggtgaagttcatggacgtctaccagcgcagctattgccgtccaattgagaccctggtggacatcttccaggagtaccccgatgagatagagtatatcttcaagccgtcctgtgtgcccctaatgcggtgtgcgggctgctgcaatgatgaagccctggagtgcgtgcccacgtcggagagcaacgtcactatgcagatcatgcggatcaaacctcaccaaagccagcacataggagagatgagcttcctgcagcatagcagatgtgaatgcagaccaaagaaagatagaacaaagccagaaaaaaaatcagttcgaggaaagggaaagggtcaaaaacgaaagcgcaagaaatcccggtttaaatcctggagcgttcactgtgagccttgttcagagcggagaaagcatttgtttgtccaagatccgcagacgtgtaaatgttcctgcaaaaacacagactcgcgttgcaaggcgaggcagcttgagttaaacgaacgtacttgcagatgtgacaagccaaggcggtga

SEQ ID NO: 768 - DNA, 1271 bp, Homo sapiens
ttatatttgggttctgcctactgagccgggagtctgggaactacaactcccagagtgctgagcggatgcacgctctgcttttaggtgtaagccgcaaacatcttggaccccgggagaatccgcgttgaagcacagagcatttagctcctctgtcagaatgaatggggaccagaaactggatgttcataaccaagaaaagcagaatttcatccagcacttctcccagattgtcaaggtgctgactgaggatgaactgggacacccagagaagggagatgctattacccggatcaaagaggtcctggagtacaacactgtaggaggcaagtacaatcggggtctgacggtggtacagaccttccaggaactggtggaaccaaggaaacaggatgctgagagcctacagcgggccctgacggtgggctggtgtgtagaactgctccaggctttcttcctcgtgttagatgacatcatggactcttcccacactcgccgggggcagatctgctggtatcagaagccgggcataggcttggatgccatcaacgatgctctgcttctggaagccgctatctaccgcctgcttaagttctactgcagggagcagccctactacctcaacctgctggagctctttctacagagttcctatcagactgagatcgggcagactctcgacctcatcacagcaccccagggccaagtggatcttggtagatacactgaaaagaggtacaaatctatcgtcaagtacaagacagctttctactctttctacctgcctatcgcggctgccatgtacatggctggaattgatggggagaaggaacacgctaatgccctgaagatcctgctggagatgggcgagttcttccagatccaggacgactaccttgatctctttggagaccccagtgtgaccggaaaggtcggcactgacatccaggacaacaaatgcagctggctggtggttcagtgtctgctacgagccactcctcagcagcgccagatcttagaggagaattatgggcagaaggacccagaaaaagtggcgcgggtgaaagcactgtacgaggagctggatctgcggagtgtgttcttcaagtacgaggaagacagttacaaccgcctcaagagtctcatagagcagtgctccgcgcccctgcccccatccatcttcctggaactagcaaacaagatctacaagcggagaaagtaacctcgaattgtagaggctgcgagggaggggtctcaataaattattgttcaac

SEQ ID NO: 769 - DNA, 1271 bp, Homo sapiens; identical to SEQ ID NO: 768

SEQ ID NO: 770 - DNA, 5055 bp, Homo sapiens
ctgggctagggatgggcacaatgcggtgttggtgtctgcagtattctactcctggacaccggtggcctgcaagtgcgcttttggcgtcctctcatttttctatccttatctccgtccgcggctgccttggccagccagtttttgattttttatctgttccttgatcgatacaaagaacctaaggacatacaggacattaatacccaactgccagctctggcccagggcttgtactgtgcagcgggctggctgcagaaacttaagtcataacactctttgtcgctgaggtctgaagctctctgcacgttctcatccctgggaacgtgaccccagcatccgacgccaagatgccggctcacatactgcaagagatctctggctcttactcggccaccaccacaatcacagcgccaccttctgggggacagcagaatggaggagagaagtttgaaaagaatcctcaccactggggagcagatgttcgccctgaaattaaagatgacctatacgaccccagctaccaggatgaggaggggcccccgcccaagctggagtacgtctggaggaacatcatcctcatggccctgctgcacattggagccctgtacgggatcacactggtcccctcctgcaaggtctacacctgcctctttgcatatttgtactacgtaatcagcgccctgggcatcacagccggggctcatcgcctgtggagccacaggacttacaaggctcggctgcccctgaggctctttctcatcatcgccaacaccatggcattccagaacgatgtgtacgaatgggcccgggatcaccgcgcccaccacaagttctcagagacacacgccgaccctcacaactcccgccgtggctttttcttctctcacgtgggttggctgcttgtgcgcaaacacccggctgtcaaagagaagggcggaaagctggacatgtctgacctgaaagctgagaagctggtgatgttccagaggaggtattacaagcccggcctcctgctcatgtgcttcatcctgcccacgctggtgccctggtactgctggggtgagacgtttgtaaacagcctgtgcgtcagcactttcttacggtacgctgtggtgctcaacgccacctggctggtgaacagcgccgcccacctctatggatatcgcccctacgacaagaacatcagctctcgggagaacatcctggtgtcgatgggagctgtgggcgagggcttccacaactaccatcacgccttcccctatgactactctgccagtgagtaccgctggcacatcaacttcaccacgttcttcatcgactgcatggccctcctgggcctggcttatgaccggaagagggtgtccaaggccgctgtcttagccaggattaagagaactggggaggagagctgcaagagtggctgagttcggggtcttccagttcctgttccaagagccggcttggcagaggcttactgttctgttaattaactactgagtattgctacccagatgctaaaatgatgaagttaacccattctggtacagtattgtaaaacggacaaatatcggaagtcaacagctctaccttttgatgctaagctgttctccccttctatcttcttttcccgttgtctttttcttcgctttgtccccaatgacctcacccctcatcgcctcccctaagccagcagccactccgctgtagttcagagttcaccttccagagcgtaccagcttttcaagggtctacagtaaaggttcacgccccagccccaacttaacgttgctccaagttacagatagaagaaaaatcttgagaaatttctcctgttattttagtccagactttgccagatggaatgggagaaaaaatagttttatttggcagagagcttgcgaagtgggtaaatcttaaggggccaaattcaacactcgggctgtgattcatcaaaattgtgggagagggggatctcctgtgatcaggctccgctccgtctggccgaggtgctggcgtctcttgacacagcgtgcctcctctcctaattctgattgggtgacagccgtggaactttgtgacactaaaatatggcaacacatcggtatctcagtgtactttaggctaaagatttaaaaaaatagagaagtgaaaaacaatttgtaggaaaagtggtctttcctaaaataagattttcttttcctttcataacaaggacctggggccaggcgtcgtggcacccgcctcaaaacagttgagaggagaggggcaggtgggtctctgagtttgaagccagccagggctagatagtgaggccttgtctcaaatagaaaagccaacaattagcaggacacacggagccgggggtcctcttgcgaggcgtgtctggaatccatgagggcggtcgctcgtggtttttgagcttcctgtgagctgcacccccagacacttgtaattcctgttcttccgtctttcggatgcaggttgctcccacaaattcaggatagctatggcgtttccatgcatcccacaatggaaggagtgtaagacttgagcttgagtcacagctaaaacccagaagacacaaagtcagtctgtcctggatcctacaaacactcaacgagtgcctccctctggaaaagatggtgaacaccttccttccactgttgggcagtggacagggaagttggaggtcgctgtaggcagctccaaggtttctaggggcaccttgccaggggacctcacaactttggcggtctctagtggagcaggttaggttttagctccctttggttcccgctgtgctttgtggtaaggcttttccctgggctgttgcctcattcctcactagctctgtgaccaggtaggactctgggatacatggctgaaagctcttttgctctaccacatctgcctctctttccctacccatttttttgtgtttcggggtggtatttttgtggtggttgttttgttttatttcttctttcctctttgacgtttagtcttgctctaggcagaaacgtcctggatatttacggtcagtaaagatgtccggtcccagcagagatacaacctctatctgcagtaggtagagaaggctgtccctttccggtggctttcagattctccacctctatccctcccaggcctctgatattctttaaactttaaaggaaaagtttggccgactttctagaaacatccctggctcagagaggctctctgtctcctcggttgttctaaaacaaatggtccgggtggtgtgggtgctggcccaagactcgattcctctgagttagggcagagcatgctccctgcactcagcaaagcctctcgggctgatcagtgctcctgggtgatgctgtggtgcttttaggaggaagacagtgttggctggctggaaagcatgacagttaaggttgtgttcttaagtgcctcagtttgaaagctttggctagggtaggagatctgagatgccgtggactttgcagaagagattttgtgcagcaacgcagaagcctggctgtgttaagattggctgtacaggatagcgaatgctgtggttggagggcacagtcttcccgtgttagttaaatagagaggctttaggacgtctctgcgcccacttgaaggtagccttatcctttagctgttcgctaaaatagaatccttgagagattgacaatatatttgctggcctgtcgccctattccttggagaggccttttgaatggttttaattccactggttatccggtgcccacttaatcaaatgtgaaaaataaaaagcagctctcttcttagcctgcccccgtggatctgaggaccctgttagatacagctgtcggtaagggtgtaccagctcactaagaaacactactgtcaagattttaaagctcagaccaagtgacacgttaataagaaactaagatctgattgaattttctaacagtccttgcctcgtggacacgctaaaattcgacttgggtgccttacctcttttctaactagtgttactcatgggcctgcgctcccttcctctgcggattccttagaaccggagagcctgtaagtgtgacaggctcaaaactggcctggctggagggttaggtggactttgatctgcagtgttccctctggggtcttcgtttggggaatatttcttggggctgttttgctgaagtgcccgtagctgatggatggtggaagtaatttgaacgtacgcgatttgtaggttttgttatttgttttaagatttaaaggctggttgtagcatttaaaagtgaaagctttttcttcctggtttgctagtgttctgcgtgtcttctttagttgaaataggttagtggagaagttaagaaagcggtggccgtgttacgctggtggtgaaggccagggccgcctacaaactctcagttttgttttgttttgtttttttataacagtcccactctgacaataatgagttcactccttggataaggttgttaatgagggaagagcccttcagacctaatcagctcttactggacccagctgtcaacactgttgcattggggattaagtttccaaccccgtgaatcatgggacagactcaaaccgtagcactgggcatgtcgcctaacaatataatgtgactcagtattctgtgagacatgggataatattcctgacctacctccacgggtaggtgcgagcatgagcaaatgctctttataaaacatttggggatcctcagcagaggagtatttaagtcctgcacatttttatagtaaccgtccaccatggacttgacacgtgcctatgtcccagacgacattgttaatctacatcattcttctcagaggttgaatggatgcattagataatgtatactcattgctatggaaacctgcaggactccttttccttccttgggtgggatttttttttcctttattatgtgcaacagtagctatttgtaatctaataattttcattaataccaactctgaaagtatttctactcatctgaggttgtgtttgttcataataaaatgaaatggatctgactgc

SEQ ID NO: 771 - DNA, 566 bp, Homo sapiens
cagtaggaacgcgggggttgtgcttttaaaggcgctagccggtacgctctggaacttgattgcttccctcttctgagcttgctcccgcgctttcagcatccaggtcacctcgccagtatgtctcaggctgattttgacaaagccgctgaggaggtgaagcgcctcaagactcagccaactgatgaagagatgctgttcatctacagccacttcaaacaagctactgtgggcgatgtaaacacagatcggccggggctgttggacctcaagggcaaagccaagtgggactcgtggaacaagctgaaaggaacttccaaggaaaatgccatgaagacctatgtggaaaaggtagaagagctaaagaagaaatatggaatataaacgaccagatttggtggccagccacatgtgtgacataatacctgtgaggacataatgccttggtgtttttttttttttctaatgtagatgacatggctctgatatgttagggccagagttaattactgctcctccttcctttggagtttttacctgaaatcaattaaaagtacatttgttactct

SEQ ID NO: 772 - DNA, 936 bp, Homo sapiens
gaattccggccgccgccaccgcgccaagttccggccgcggccaccttccgccgtccagggctcctccgcctcggccccgggaccccggctccccgccagccccggccccggcaccatgtcggagaagagcgtggaggcagcggccgagctaagcgccaaggacctgaaggaaaagaaggacaaggtggaggagaaggctggccggaaagaacggaagaaagaagtagtggaggaggaggagaatggagctgaggaggaggaagaagaaactgctgaggatggagaggatgatgatgaaggagacgaagaagatgaggaggaagaggaggaggaggatgaaggccccgtgcggaagagaactgctgaagaggaggatgaagcggatcccaagaggcagaagacagaaaacggggcgtcggcttgagcccctgcccgtgggcttggggatgggaggcccctcaggtcctggaggtggggcaggaacacacaaatccagccccccttctcctggctccctcgtctggccctgccccagagctgtgacccttgccctttgacccagcctctcatttccatctctccagacactgctccttcaccctcactgccacaggtccagcccccaacccgcctcatccaagctccccagccggccctcacttgccctagcattccttgttcttccctgccttcctcaccatcgatctgttccagtccttgcgaagcctctccttcccctctgcaccccgagcctctcagcctgcccttctctctcctgcctgacccctgggtctccctcagattccctcctctcagacagcgccaggccggggtggggctggggttggggccaagccccgaagctgccccctcccctttttgtataatttaataaagaaacggtcgcgcttcaaaaaaaaaaaaaaaacggaattc

SEQ ID NO: 773 - DNA, 936 bp, Homo sapiens; identical to SEQ ID NO: 772

SEQ ID NO: 774 - DNA, 1978 bp, Homo sapiens
  misc_feature (481)..(481): n is a, c, g, or t
  misc_feature (1490)..(1490): n is a, c, g, or t
ctcgctgcggtccaagcaggtaaagcggggctcggcgaacgcgcgcgacccgaggggcgtggtccgcggtcccgggggtcccggcccggcccttcccgcttccctgtgtccccgcagacacttcgccatgggcaatacgagcagcgagcgcgccgcgctggagcggcaggctggccataagacgccgcggagggacagctcggagggcaccaaggatggggacaggcccaagatcctgatggacagccccgaagacgccgacatcttccacaccgaggaaatgaaggctccagagaaggaggagttcctggcgtggcagcacgacctcgaggtgaatgagaaagcccccgcccaggctcggcccaccgtatttcgatggacagggggtggaaaggaggtctacttgtctggatccttcaacaactggagcaaattgcccctcactagaagccaaaacaacttcgtagccatcctggacctnccggaaggagagcatcagtacaagttctttgtggatggccagtggacccacgatccttccgagccaatagtaaccagccagcttggcacagttaacaacatcattcaagtgaagaaaactgactttgaagtatttgatgctttaatggtggattcccaaaagtgctccgatgtatctgagctgtccagttcccccccaggaccctaccaccaggagccttacatctctaaaccagaggagcggttcaaggccccgcccatcctcccgcctcacctgctgcaggtcatcttgaacaaggacacgggcatctcttgtgatccagcgctgcttccggagcccaaccacgtcatgctgaaccacctctatgcactctctatcaaggatggagtgatggtgctcagtgcgacccatcggtacaagaaaaagtacgtcaccaccctcctctacaagcccatatgagaggatgagccagccgtgggccacgggacagcaggcgggagccgctgggctctccgtgtgcatgcgcatcctcactccgggacatctcacccccacatagtcctccttgaaggtctgtccaggcacagccagaaatcggatggacggcagaccgtggtcccagcaccgcaggcagtgcgccaggctctagtgctctaagcatcatccctctgctggcccgagatgtctacagccagacctgaatgctggttcctgctagaaaacctaggacaggaactgaagtcaccaaagccctcatcatccctgctgaagcctggcttggaagaaagcagtgctcggtcttgcctgtccttccgaatcacagcagtagattgtagactccatggaatttcagtgtccaatttccagatgcagcttcgcaatcgattcctgacactgtgcactgagaccttcttaaccagagtggctggctgtccactctcacttaaggcaataagtcaccaggacgagactataggtcatgtgactactgagcaataatcgttctcanacagacatcagaaaccactgccatttctccatcaagccagacgatcctgaggactgaccaccatgggaggttgtccaccttatttcagttgcagtgttggccatgttaccgtgacaacctggtcgaagtgcccgccctctttttagttctagcacgtgctactcagctgggggccgtgtctccagtgagcagagagtgtacacggtggttactattgcctgatcctaagagagcttggcaccctgcggcagactgctaggttccagcagggttggcacgagtgaacctatgtgtgctcagtgtgatttccacagtgatgtcacagacgtgcccattggtacaggctcctgtcacctgtcagcataggtaggcacaagctctgtggtgtccgctatttggttaaacctgagttttgggtaccttttgttactgttttcaaaacacggacttgctgtcatcttgatgtacaagtttcaataaagctttgg

SEQ ID NO: 775 - DNA, 3089 bp, Homo sapiens
gatacactgcgcagtggaacggcgagtgcagggcgcagccatgatcacttcagccgctggaattatttctcttctggatgaagaagagccacagctcaaggaatttgcactacacaaattgaatgcagttgtgaatgacttctgggcagaaatttctgagtctgtagacaaaatagaagttttatatgaagatgaaggtttccgcagtcggcagtttgcagccttggtggcatcgaaagtattttatcacctgggggctttcgaggagtctctgaattatgctcttggagcaggtgacctcttcaatgtcaatgataactctgaatatgtggagactattatagcaaaatgcattgatcattataccaaacagtgtgtggaaaatgcagatttgcctgaaggagaaaagaagccaattgaccagagattggaaggcatcgtgaataagatgttccagcgatgtctcgatgatcacaagtataagcaagcgattggcattgctctggagaccaggagactagatgtgtttgagaagactatactggaatctaatgatgtcccaggaatgctagcttacagcctcaagctctgcatgtctttaatgcagaataagcagtttcggaataaagtattgcgagtcctggttaaaatctacatgaacttggaaaaacctgatttcatcaatgtttgtcagtgcttaatcttcttagatgacacccaggccgtgagtgatatcttagaaaagctggtaaaggaagacaacctgctgatggcctatcagatttgctttgatttgtacgaaagtgccagccagcagtttttgtcatctgtgatccagaatcttcgaactgttgggacccctattgcttctgtgcctggatctaccaatacgggtactgtgccaggaccagagaaagacagtgactctatggagaccgaggagaagacagccggtgcagtggcagggaaaacaccagacgctagtccagagcccaaggaccagacattgaaaatgattaaaattttaagtggtgaaatggctatcgagttacacctgcagttcctaatacgcaataataacacagacctcatgattctgaaaaacacaaaggatgcagtacgaaattctgtatgtcatacagcaactgtaatagcaaactcattcatgcactgtgggactaccagtgaccagttccttagagataacttggaatggctggccagagccactaactgggccaaatttactgcaactgccagcttgggtgtaatccataagggccatgagaaggaagcactacagttaatggcaacatacctccctaaggacacttctccaggatcagcctatcaggaaggtggaggtctctatgcattgggtctcattcatgccaatcatggtggtgacataattgactatctccttaatcagctcaagaatgccagcaatgatatcgttagacatggaggcagcttgggccttggtttggctgcaatgggaactgcacgtcaggatgtatatgatttgctgaaaacaaacctgtatcaggatgatgctgtgacaggggaggcagctggcctggccttaggtttggttatgttaggctctaaaaacacccaggcgattgaggatatggttggctatgcacaagaaactcaacacgagaagattctgcgtggtctagcagttggcattgcgttagtgatgtatgggaggatggaggaggccgatgctctcattgaatctctctgtcgtgataaggacccaattcttagaagatctggaatgtatactgtagccatggcttattgtggctctggtaacaataaagctattcgacgcctgctgcatgttgctgtaagtgatgtcaacgatgatgtcagaagagcagcagtagagtctcttggcttcattttgttcaggacgcctgaacagtgtccaagtgtggtctctttgttgtccgagagttataaccctcatgtgcgctacggcgctgcaatggccctgggagtctgctgtgctggtacaggaaacaaggaagcaattaatttactggagccaatgaccaatgaccctgtgaactacgtgcggcaaggggctctgatagcctcagctctcatcatgatccaacagaccgaaatcacgtgtccaaaggtaaaccagttccggcagctgtattccaaagtcatcaatgacaagcatgatgatgtcatggccaaatttggcgctattctggcccaaggcatactggatgcaggtggtcataatgtcacaatctccttacagtccaggactgggcacactcatatgccttctgtggttggcgtccttgtctttacccagttctggttctggtttcccctttcacacttcctatcattggcttatactcctacctgtatcatcggccttaacaaggatttaaagatgccgaaagttcaatataaatcaaattgtaaaccatccacattcgcataccctgcccctctggaagttccaaaagaaaaagaaaaggaaaaggtttccaccgctgtgttgtctattactgccaaagctaaaaaaaaagaaaaagaaaaagaaaaaaaggaggaggagaagatggaagtggacgaagcagaaaagaaggaagagaaagagaagaaaaaagaaccggaaccaaacttccagctgttggataatccagcacgggtcatgcctgcccagctgaaggtcttaagtatgacagagacctgcagataccaacccttcaagccactctccatcgggggcatcataattctgaaagacaccagcgaagacattgaggaacttgtggaacccgtggcagcacatggcccaaagattgaagaggaggagcaggagccagagcccccagagccatttgagtacatcgatgactagggccagggatcccacctgctcagctgtagatgactatcctggcacacactgaaatgtcgtgagggaacccacgctgagacccgctcgatccacacatcattgcctacgctgacataaggaacccgtgtcctgagtctttgattgagaagattctgactgttcagtgttctctttcacaaaaaaaaaa

SEQ ID NO: 776 - DNA, 3089 bp, Homo sapiens; identical to SEQ ID NO: 775

SEQ ID NO: 777 - DNA, 1790 bp, Homo sapiens
gcgagcgcgcgcgtcccccgccctcgagccgccgcccgccgccgcgccgcgcgatccgcaccggcctccccgagagcgagccggccgccgcgaccgccaccgcgctaaccgccgccaaccgccaccgaggtgcccggagagagcggagaggcggcatgagcgaggcgggcgaggccaccaccggcggcaccacgctcccgcaggccgcggccgacgcgcccgccgcggcgcccccggaccccgcgcctaagagcccggcggccagcggcgcgccccaggccccggcgcccgccgcgctgctcgcggggagccccggcggagacgcagcccccgggcccgccccggcctcatcagcccccgcgggaagcgaggacgcggagaagaaagttctcgccaccaaagtccttggcactgtcaaatggttcaacgtcagaaatggatatggatttataaaccgaaacgacaccaaagaagatgtgtttgtacaccagactgccatcaagaagaataatccacgcaagtatctgcgcagtgtgggggatggagaaactgtagagtttgatgtggttgaaggagaaaagggtgctgaagcagcaaatgtgactggcccagatggagttcctgtagaagggagtcgctatgctgctgatcggcgccggtacagacgcggctactatggcaggcgccgaggacctccccgtaattacgctggggaggaggaggaggaagggagcggcagcagtgaaggatttgagccccctgccgcagatgggcagttctctggggccaggaatcagctgcgccgcccccagtatcgccctccgtaccggcagcggcgtttcccgccttaccacgtgggacagacctttgaccgtcgctcacgggtctttccccatcccaacagaatgcaggctggtgagattggagagatgaaggatggagtccccgagggagcgcagctccaggttcatcggaatcccacttaccgcccaaggttccgcaggggacctgctcgcccacgacctgcccctgctattggagaggctgaagataaagaaaatcagcaagcggccaatggtccaaaccagccgtctgcccgccgtggattccgacgcccctacaactacaggcgccgcccccgtcccctcaacgctgtttcacaagatggcaaagagaccaaggcaggtgaagcaccaactgagaaccccgctccagccaccgaacagagcagtgccgagtgaccctggctcccaggcaccttcaccaccagcagggtgaccttaagaattaatgaccattcaaaaacaaggcaaaaagcacacccacgaccttaccaacaccaaagaaacatctaagcaataaaacggaagactaaccaagatttggacattagaatgtttactgctattctctacgaaactaacaactgcaaagggaaggagcccgcactgtccatcaagctgcgtcccgggaacctgcacaggcagagagcagcctccccatttcagcaacctagtgctttatatttttttcctggtttttactgttttggtaatatgaattaaaagaagaaatattaataccacatggggattgccccaaccaaagaaatctgaaatatatagtaaatgctctttttcctttgttgttcattttggatgctggtgctaaacttccaagtgtcatgatttaagaagaaattttatgcccttatttattcctaggatgaggggagaacatttttgctttcttacatagctctctctgaaatgtgcagtaacaagttcctc

SEQ ID NO: 778 - DNA, 2681 bp, Homo sapiens
gagtgcagagagccaagccgggtgcaggagttttcttactgtgactataccatggaaaatcaattggctaagtcaattgaagaacgaacattccagtaccaggactctcttccgcccttgcccgttccttcgcttgaagaatcactgaagaagtaccttgagtcagtgaagccatttgcaaatgaagacgaatacaagaaaactgaagaaatagttcaaaagtttcaagatggagttggcaagacattgcatcagaagttacttgaaagggctaaaggaaaaagaaactggctggaagagtggtggctcaatgtcgcctacttggatgtgcgtattccatcacaactgaacgtgaactttgtgggtccgtctccccactttgaacactactggcctgcaagggaaggcactcagttggaaagaggaagcatactactgtggcacaacttgaactactggcagctgctaagaagagaaaaattgcctgtacataaatctggaaatactcctctagacatgaaccaattccggatgctgttttctacctgcaaggttccgggaatcactagagattcgattatgaattattttaagactgagagcgaggggcattgtccgacccacattgccgtgctgtgtcgaggcagagcgtttgtcttcgatgtcctccatgacggttgtttgatcaccccaccagaacttctcagacaactgacatacatctaccagaaatgctggaatgaacctgttgggcccagtatagcggcattaaccagtgaggagcgaactcggtgggcgaaggcaagagaatatctgattggtcttgatccagagaacttgactttattagaaaaaattcaatccagtttatttgtgtattccatagaagacaccagtccacatgcaaccccagaaaatttttctcaggtctttgaaatgcttcttggtggagatccagcagtgcgctggggtgacaagtcctataatctgatttcctttgctaacggaatatttggctgtagctgtgatcatgctccttatgatgcaatgcttatggtgaacattgctcactatgttgatgagaagctcctagagacggaagggagatggaagggttcagaaaaagtccgggatataccgttgccagaggagctggctttcactgtggatgagaagatactgaatgacgtctaccaagccaaagcccaacacctcaaagcagcatctgatttacagatagcagcatctaccttcacatcttttggcaaaaagctcactaagaaggaggcccttcaccctgacacctttattcagctcgctcttcagctcgcctactacagacttcatggacgccccggttgctgctatgaaacagctatgacaagatacttttaccatggccgaacagagactgtgcgatcttgtacagtggaggccgtcaggtggtgccagtccatgcaggatccttctgccagtctccttgaacgtcagcaaaagatgttagacgcttttgcaaagcataacaagatgatgagagattgttcccatggaaaaggatttgaccgtcaccttttaggccttttgctcatagcaaaagaggaaggcctccctgttccagaactgtttgaggatccacttttctccagaagtggaggaggtgggaattttgtgctgtcaacaagtctggttggttacttacgaattcagggagtcgtggttcccatggtacataatggatacggctttttctaccacatcagagatgacaggtttgtggtgacatgttcatcctggaggtcatgtcttgagactgatgcagaaaagttagtggagatgatttttcatgctttccacgatatgatacatctgatgaacacggctcatctttagagactcagagacatacaggtcacagaaactgggtacggagaatgggatggtgatacgacatggaaggaatgttgacttaaaggaaacctgttaatgcagggattagagagggatgcactctagatttattctaccttaaagccttctgttgcaacagcaatgcaaactcagacatagtgaatagaactatgcaatgttttaagcctcaacaatgcacatctgtatattttaacaatacaaatcctactctaatgttaaaatatttttgttggcacatgtgtaggttgcaagtcctctgtgaacataattatagagtatttctcaagcactttaatactttctaatggccagagggtataaaacccatggttagatgctaatttccctgacatcagtgccttctacatccagcacaggagtacaagcctatgagatttcatgggaaaaccactattgttcaatattgatctaaaatagctcctttgaacagacaaaagtatcaagttgtattagaaaagaatattagcaaaactcattatgatatgttgtaattaattttgtgaatataaaatcaaaacacttccatttaaatctacttggtagagttagtggctttaaagggttaaatgtcgagtatgattctcagaactttataattatttcccactgttattcaaaatgttagcatatagacattctcccattgtaattcagtgtttatattctcaaagaataaagcatccagaatccttgtaatttctcatttattttcaataaaaatgattcctgat

SEQ ID NO: 779 - DNA, 2681 bp, Homo sapiens; identical to SEQ ID NO: 778

SEQ ID NO: 780 - DNA, 1830 bp, Homo sapiens
tggcgagttatggagcgcgctctcccggcggccggcttcctatactgggtgggcgcgagcaccattgcttacctgaccctgcgagcctcgtactcgctcttcagggccttccaggtgtggtgcgtgggcaaccaggcctttgtcggcccgcggctcggagaatgggcagttgttacaggtggcactgatggaattggaaaatcatatgcagaagagttagcaaagcgtggaatgaagattgtcttgataagcagatcccaggataaactgaaggaagtttccaacaacatcaaagaaaaattcaacgttgaaacaaggaccattgctgtcgacttttcattggatgatatttatgataaaattaagacaggcctgtctggtcttgaaattggcgttttagtgaacaacgtgggcatgtcatacgagtatccagaatactttttggaaattcctgacttggacaacaccatcaagaaactgataaatattaatgtgctttccatttgcaaggtgacacgcttggtgctgcctggcatggtagagagatctaaaggggtgattctcaacatctcctctgccagtggcatgctcccggttccactgttgacagtctactctgcaaccaaggcctttgtagatttcttctctcagtgcctccatgaggagtataagagcaagggcatctttgtgcagagtgtcctgccattctttgtatctacaaaactggcaaaaatacggaagccgactttggataagccctctgcagagacatttgtgaagtctgcaattaaaacagtaggtctgcagacccgaaccactgggatatgtgatccacgccatcatgggctcaataaactcaatcttgccccgttggatttattttaaaacgatcatgggtttcaacaagtctttgcggaatcgctatctgaagaaaaccaagaagaactaagttctgctgggtcatcgagctccttggccagacgcttgacctgtgcttgcatactgggcccctgcctgtccccagagtctctactgtcatctcagtaattactaacatggcatagctggcggaaagcaaattccttttagaggttcctaacatatattctggatacaaccaggagtaatttgaagtttaatataaatgttcttggcaaatgtatgtataccactttgacagaaaggaacagatcccagaatgacagacgtagcacccatccggcccagaatgccaatgattacctaatatttggtctggaacctactataaagtgtaatagctagctacttttttatttttaacattaaagggaatggggcttagttgattttttttttatgggcagatacaatgcagtttacattgatttctgtaaggttttctaaaggtatgttccagcttatgtgtttctatggaactggtcttcttaaaagtagctaagaaagacataaagagaattgaaacacggagttctttctaacacagaagtccacaaaatgttattcttggaacacacattatgtctgctctgttccatgtatgtaaatactgaatgctatatagtgtgactgaaatgtaaaggtaagtgggcccaagtgtacatcaagaccagcaacatcctgtggtactgtgggatccagaagagcagcctgcctggatatccagtgttggtcatgtctgtactgcacccatactatttgcctaggatgacagactccttctgtggtagtgaggggtcatggaaacatgttctttttaagttggtgtctcatttgaattcatatatccacttttaataaaagatgatgtaaccgcaaaaaaaaaaaaaa

SEQ ID NO: 781 - DNA, 1969 bp, Homo sapiens
gggacacacgcaccctgtacaggctccttgcccactccaagtcaggagagggcgtggagagatgcagggcagctaggccggttgcaatcttcccaagattgcaacttgtcccaagccggtggtagctcaggggacaggacccattcaaattagtccttctgaggacagtttactgcctttggctggagatgaagcctgcaggtacgggccccacagtctcctctgggggcgagtccaccgacgtgtccctcggcccgccgtttccttggccctgcccgcccgacgtgcggctctgtggccatctgaggaagcagaagtcccagcgccgccgctttttcgtgctgcgtgctgacccaccacggctggagtgctatgagagcgagaagaagttcttggccagcggctgccgcccacctcgaccccggcgtaccgttagcctggaaggtgcctgcactattagcaagcgcgcggatgcccgtcagcgccacctgatcgtcatctataccagcgacagcagcctgggcgtggcggcggccagtgaagcagagcagcaaacatggtacagcgccttgctcgaggtgcgcgccaccgccgctgcagctgctgccaccgctatgggtttcagcccccaagaggcccctgagtcttggatcttcgccccgttccaggacgtctggcctgtgacactgcggtccaaggggctggggagagcaccaggcctgagcagcggcagctatcgcctgtgcctgggttctggggccctgagcctcctgcggaagccgggaagcaaaggctccagagacagccgggcaacgccaccaccagtcctgcgcttgtccttgcttagtgtgcgccgctgcggccacgcagattcctttttcttcctggaactcgggcgctcagcgcccataggtcctggtgagctgtggctgcaggcccctgatgcagtggtggcccaaagcattcatgagaccgtcctggctgccatgaagagactggggagcagtgcagccagtggcaaagctgaggcaccgctgggagattctccaaagggggcttctgcagtccctgccccagcaccatatgagatccctgctttggcactggcagcacaagcgagaagtccgggtgagagagcgaagcaggactacgtcaatccactggaaaggatggggtcagcaccctcctacagggggccagatctgggtggggactacatcgccatgggaatgaggaatgactatgtgcacatgggggggaaagctgctgagtacatgtggatggcgcccccaggtctccctccccccacccctcccagggtagatcccagaaaggagcctgaggattgtgagagcacagagtatatgcccatgaacagatttttaccggggcctctttactacgagttcaaggccagggagcctgaacatgggcattctagtgcccagtgtagcattagggacagatggagacccatggtggctcagccccgctcttcccaagggtcagagctctctggggactacatgtacatccctgactatcccagtgctaggctggggtctctggacagctgcctcaactatgtggacctggacctagtccctcccctggaggttcctggagcggccccagggaatagtccacatagctatgccagcatcaagttctagaactttcagaagataggggaggagaaccaagcattggttagggaagagaggaaaagaagagaaaaccttagcactgttcagctcagcttctgcacataggagccagggactctgaggccttgtgaggtgctatgctgcccccttgcctgctctgtctcttccagctgtaccgcctcagaaacacctcaggaagaagtgctccaaagaaattagactcttaagagaaagtactagaacatctctctgcacccccaccccaaacccaaacaacaaacaaataaaacacctacagaacc

SEQ ID NO: 782 - DNA, 1648 bp, Homo sapiens
gagagctgggcaatgaaccactgtagcgggctttgcattgctgcctctacctacagctattactggtcattggaagaccttagagtcagaatcttcttgtgtaagagccctgaatgctgtgaccaaccccagtgtctacagcatctttgcagctgttaatctcactgttctcgttcctattgaagaaattactggcccagaaatgcctttggtgtgtttggcagactttaaggcacatgcgcaaaagcagctgtctaagacctcctgggactttattgaaggagaagctgacgacggcatcacctacagtgagaacatagcagcatttaaaagaatccgcctccgcccccgatacctgagagatatgtcaaaggtggacaccaggaccacaatccaagggcaggagatcagtgctcccatctgcatctcacccacagcctttcactccattgcctggccggatggagaaaagagcacagctagagctgctcaggaggccaacatctgctatgtcatcagcagttatgccagctattccctggaagatattgttgctgctgcccccgaaggctttcgttggttccaactctacatgaagtcagactgggacttcaacaagcagatggttcagagggcagaagccttgggtttcaaagctttggtgatcactatagatacgcctgtacttggcaataggcgacgggacaagagaaaccagctgaatttggaggcaaacatattgttgaaggatctccgagccctcaaagaggaaaagcccacacagtctgtgcccgtgtcttttccgaaagcatctttctgctggaatgatctttccttgcttcagagtataactcggttgcccattatcctcaaagggattttgacgaaagaggatgcagagttagcaatgaagcacaacgtccaaggcatcgttgtttccaaccatggtgggaggcagcttgatgaggtttctgcttcaattgatgctctgagagaagtggtggctgctgtcaaagggaaaattgaagtgtacatggatggtggggttcgaactggcactgatgtgttgaaggcactggcccttggagctaggtgcatttttcttgggagaccaatcctttggggccttgcctgcaagggtgaagatggtgttaaggaagttttagatattctaacagcagaactccatagatgtatgaccctttcaggctgccagtcagttgctgagattagtccagacctgattcagttctccagattataaggacctactgagatccctacaagaggaagacaagacttcaacatagtgtgtgagcctattcttcttcggtccgatcatacctagtagtttgagccctctaccttgagaaatccagatcgatgaagaaaagatagctaacagctaccagaggggtgcatttggatgaaggaataacatctaatgttctacaggataactataactgacaattaattgactatgtccaatagccatgttccagaaagaaaggaaatagttacatctggtgtgacatgccaattactttcatttgattattatgtacactatacattattaaaacgtcatactgtgccataattatgtgcaattactatgtatcaattaaaacaacaatatatattt

SEQ ID NO: 783 - DNA, 4422 bp, Homo sapiens
gatcctgggagagtccgacgttcgccggctaacgcaggacaggtcactgaggtccgccaggtgtgtccgccgtttgtttcctgcccctcgccaggttcggtgtccgctgccgaggcccgaggcccttcttccgctgtcggcgcgcccccctgtctcgtttcggccccgccgggacaacgcctggagtcgcagcagccgggtgatcgcgcccgtcatcctctaccaacgtttccaggctgccctgctcgggagtgggtgagaatgaagctaaaggagatagaccgcacagcgatgcaggcgtggagccctgcccagaaccaccccatttacctggccacagggacatctgctcagcagttggacgcgacattcagtaccaacgcttcccttgagatattcgagctcgacctttccgacccgtccttggatatgaagtcctgtgctactttctcctcgtctcacaggtaccacaagttgatttggggacctcataaaatggattccaaaggagatgtttctggagttttgattgcaggtggagaaaatggaaacattattctctacgatccttctaaaattatagctggagacaaggaagttgtgattgcccaaaaggacaagcatactgggccagtgagagccttggatgtaaacatcttccagaccaatttggtggcctctggtgctaatgaatctgaaatctacatttgggatctaaacaattttgcaactccaatgacgccaggagctaaaacacagccaccagaagatatcagctgcatagcctggaacagacaggtccagcatatcttagcatcagccagtcccagtggccgggcaacggtctgggatctcaggaaaaacgagcctattatcaaagtcagcaaccacagtaactggatgcactgctctgggctggcatggcaccctgatgtcgctactcagatggtccttgcttctgaggatgatcgattaccagtggtccagatgtgggatcttcgatttgcttcctctcccctccgggttctggaaaatcatgccagggggattttggcaattgcttggagcatggcagatcctgaattgttgttaagctgtggaaaagatgctaagattctctgctctaaccctaacacgggagaggtattatatgaacttcccaccaacacacagtggtgctttgatatccagtggtgtcctcggaatcctgccgtcctgtctgccgcttccttcgatggtcgcatccgtgtctactccatcatgggagggagcatagacggcttaaggcagaaacaagttgacaagctttcgtcgtcttttgggaatcttgatccgtttggcacaggacagccgctccctccattacaaatcccacagcagacttcacagcacagcatcgtgctgcccctgaagaagccgcccaagtggatccggagacctgtgggcgcctccttctcattcggagggaagttggtgactttcgagaacgttacagggcagcctcagcagggagctgagcagccacggcggcagcccgtgttcatcagtcaggtggtgacagaaaaggacttcctcagccgctcagagcagctacagcacgtcgtcgagtctcagggctttatcagttactgccagaaaaagatcgatgcgtcccagactgacttcgagaagaatgtgtggtccttcttgaaggtaaagtttgaggaggattctcgtgggaaataccttgagcttcttggatatagaagagaagatctgggagagaagattgctttggccttgaacagagtggacggatccgatgtggctcttaaggactctgaccgcgtagcgcagagtgatggggaggagagccctgccgaggaagggcagctcctgggagagcgcattaaagaggaaaaacaggagtgtgactttctgccctcggctggcggtgggacctttaacatctccgtcagtggggatattgatggtttaattacccgggctttgctgaccggcaattttgagagcgcagttgacctttgtttacacgataaccgaatggctgatgccatcatattagccatcgcaggtgggcaggagctcttggctcaaacgcagaagaaatactttgcaaaatcccaaagcaagattaccaggcttatcactgcggtggtgatgaagaactggaaggagattgttgaatcctgtgatcttaaaaattggagagaggctttagctgcggtcctcacttatgctaagccagatgagttctccgccctgtgtgatctcttgggagccaggcttgaaagtgaaggagacagcctcctgcggactcaggcctgcctctgctatatctgtgccgggaatgtagagagattagttgcttgttggaccaaagctcaagatggtagcaaccccttgtctctccaggatctgattgagaaagttgtcatcctccgaaaagctgtacagctcacgcaagccctggacacgaacactgtcggggctcttctggccgagaagatgagtcagtatgccaacttgttggcagcccagggcagcattgccgcggccttggcgtttctgcctgacaacaccaaccagccagatatcgtgcagctgcgtgacagactctgcagagctcaaggcaggtctgtgccggggcaggagtcctctaggagctcctacgaggggcagccgctgcccaagggcgggcccgggccgtttgctggtcacccgcaggtgtccagagttcaaagtcagcaatattatccccaggttagaattgcccctactgtcactacctggagtgacagaactcccactgccctccccagccatccacctgcagcctgtccctctgacacacagggagggaatcctccacctccaggtttcataatgcatggcaacgttgttccaaatagccctgccccactgccgacgtctccaggccacatgcacagccagccaccaccttatccgcagccgcagccttaccagccagcccagcagtattccttgggaacaggggggtcagcagtttatcgacctcaacagcctgttgctcctcctgcttctaagcgttaccctaacgccccatacgtatctcctgtcgcttcctactccgggcagcctcatatgtacacagcacagccagcctcctcccctacctccagctctgctcctcttccccctcccccttcctctggagcgtccttccagcatggcggaccaggagctccaccgtcatcttcagcttatgcactgcctcctggaacaacaggtacaccgcctgctgccagtgagctgcctgcgtcccagagaacaggtcctcagaatggttggaatgatcctcccgctttgaacagagtaccgaagaagaagaagctgcctgagaacttcatgcctcctgtccccattacgtcaccaatcatgaaccctgggggagatccccagccacaggggctgcagcaacagccttcagcttcagggccacggtcaagccacgcctccttcccgcagccgcacctagccggcggccagcccttccacgggatccagcagcctcttgctcaaacaggcatgccaccgtctttctcgaagcccaacactgaaggggcccccggcgctcccattgggaacaccatccagcatgtgcaggctctgccaacagaaaaaattaccaagaagcctattccagacgagcacctcattctaaagactacgtttgaggaccttatccagcgctgcctctcctcagctacagacccccaaaccaagaggaagctggacgacgccagcaaacgcctggagtgtctgtacgacaaacttagggaccagacactttctccaacaatcatcagcggtctccacagcattgcgaggagcattgagacgaggaactactctgaagggttgaccgtccacactcacatcgtcagcaccagcaacttcagtgagacctcagccttcatgccagtcctcaaggttgtgctcagccaggccagtaagctgggcgtctgagacagctgccatgacctccgactccgccacttctccaaagaaagccatgctaagactgggaccagcccctcattagcatgtttccatggcacccgccacccaggagctttgacatttctgcaggcaaactcccctagaactgcttgaaccccccctcccaccccgcccgtgctttcctttgttttaatcccctcgcccattatgattttcccattctgcaaatagtgtctttcctggattacacatagtgtggtttcctgagggattctgacaaaatgtggtttttaaaacttgggtgtactttttaggaaaattgcatctggctgtgtataaaacagacctaaaatagatttctttaatgtcttccctaccttcttcacgttcatcagattaaagttgtaatcccatctt

SEQ ID NO: 784 - DNA, 620 bp, Homo sapiens
tgcttctgacatagttgtgttgactcacaaactcagaaacagacaccatggtgcacctgactgatgctgagaaggctgctgttaatggcctgtggggaaaggtgaaccctgatgatgttggtggcgaggccctgggcaggctgctggttgtctacccttggacccagaggtactttgatagctttggggacctgtcctctgcctctgctatcatgggtaaccctaaggtgaaggcccatggcaagaaggtgataaacgccttcaatgatggcctgaaacacttggacaacctcaagggcacctttgctcatctgagtgaactccactgtgacaagctgcatgtggatcctgagaacttcaggctcctgggcaatatgattgtgattgtgttgggccaccacctgggcaaggaattcaccccctgtgcacaggctgccttccagaaggtggtggctggagtggccagtgccctggctcacaagtaccactaaacctcttttcctgctcttgtctttgtgcaatggtcaattgttcccaagagagcatctgtcagttgttgtcaaaatgacaaagacctttgaaaatctgtcctactaataaaaggcatttactttcactgc

SEQ ID NO: 785 - DNA, 1403 bp, Homo sapiens
gggcttgcggcttctaaaatgccggattacctaggtgcagaccagcggaaaaccaaagaggatgagaaggacgacaagcccatccgagctctggatgaaggggatatcgccttgttgaaaacttatggccagagtacttattcgaggcagatcaagcaggttgaagatgacattcagcaacttcttaaaaaaattaatgagctcactggtatcaaagagtccgacactgggctggcccctccagccctctgggatttggctgcagacaaacagacacttcagagtgaacagccgctacaggttgcaagatgtaccaagataatcaacgccgattcagaggacccgaaatacatcatcaacgtgaagcagtttgccaagttcgtggtggatctcagtgatcaggtggcacctactgacattgaggaagggatgagagtcggcgtggacagaaataaataccaaattcacattccactgcctcctaagattgacccaacagttaccatgatgcaggtggaggaaaaacctgatgtcacatacagtgacgttggtggctgtaaggaacagattgagaaattgcgggaagtggttgaaacccctctactccatccagagaggtttgttaaccttggaatcgagcctccgaagggtgtgttgttatttgggccaccaggcacaggcaagaccctctgtgccagggcagtggccaatcggactgatgcttgcttcatcccagttatcgggtctgagcttgtacagaagtacgtcggtgagggggctcgaatggttcgggagctttttgaaatggccaggacaaaaaaagcctgccttattttctttgatgaaattgatgccattggaggggctcggtttgacgatggcgctgggggtgacaatgaggtgcagaggaccatgttggagctcatcaatcagctggatggctttgatcctcggggcaacatcaaagtgctcatggccactaaccgacctgatactctggacccagcgctgatgaggccagggaggctggacagaaagattgagttcagcttacctgacttagagggtcgaacgcacatctttaagattcatgctcgctcaatgagtgtggaaagagacatccgatttgagctactagcccgcctgtgtccaaacagtactggagcggagattagaagcgtttgcacagaggctggtatgtttgcaatccgagcccggagaaagattgctacagagaaggacttcttagaagctgtaaataaggtcatcaagtcgtatgccaaatttagtgctactccccgctacatgacatacaactgagccacagaggctttgactgaaggaacttcctgtgcgttcataacttgttaccgcctcacaaaaataaaagacttaaaaactgt

SEQ ID NO: 786 - DNA, 1403 bp, Homo sapiens; identical to SEQ ID NO: 785

SEQ ID NO: 787 - DNA, 1458 bp, Homo sapiens
gagggtttaggctggtctccggtgacctcctagtcctaaatcttgatacccttgcaagagctttgagcgtgtggggtcccgggcgttcggggtcccgggtgtgtgcggtttgtatagcctgaagccggggtcctccgcgctcgcgtcctccgcagctggactgaagagacgcgtcccagccctgcggggatggaacggaccgagctgctgaagccccggaccctggccgacctcatccgaatcttgcatgagctcttcgccggggacgaagtcaatgtggaggaggtgcaggctgtgctggaagcctacgagagcaatcctgccgagtgggctttgtatgccaaattcgatcaatacaggtatacccgaaaccttgtggatcaaggaaatgggaagtttaatctgatgattctgtgctggggtgaagggcatggcagcagtattcacgatcacacggactcccactgctttttgaagctgctgcaaggaaatctaaaggagacattgtttgactggcctgacaagaaatccaacgagatgatcaagaagtctgaaagaactttgagggaaaatcagtgtgcctacattaatgattctattggcttacatcgagtagagaacgtcagccacacagagcctgctgtgagccttcacttgtacagtccacctttcgatacatgccatgcctttgaccaacgaacagggcataaaaacaaagtcaccatgacattccacagcaaatttggaatcagaactccatttacaacttcaggttcactggagaacaactaagacctgccaagcctttcaaagttttgcttctgggtcgttggaatgttttaccttggataagagaggccacccatcatttgctgtccagttatacattttaataagtccatgctcagtgtgtatactaaggaagcaaaccatcccctgagctatgcaggagaaaaatcccactaaagaaaaagtcacttgatttttaatagccaaatcaccttgctcccagttcttctgtcttctaactccatggaaattctattgggagttctcagtggggttttttttcaaccttaggaaagcacttctggtctctgaactctaataatcaataagtaaaaatgaagaaaccacaagctatcacatgtctgttttcatacctggaagtctaagtgtggaaatctttaatttactttgtatgttcttaatgtttgacaagaatttttttaaatcttggttttcagttttttcaaccctgtttgacaaattcctatgctgtggagactagggatgcagatagcagtttggtgtttggtagtgaacagcagtggggccagaaatgtgcatgtatccagacctcctgcaaataaaaactgaaactcatgtgtaatgtgtgccaccaccttaagctgccaccaaaattgccaaacgactttaataaaactggatttgaga

SEQ ID NO: 788 - DNA, 1458 bp, Homo sapiens; identical to SEQ ID NO: 787

SEQ ID NO: 789 - DNA, 1596 bp, Homo sapiens
aatctaagactgcgctgggagctcagagagtgggcccccctgcctcaggaccagacagaagtagggacatgtttgaatatcccatttaaaaccactctgcacgcaccggattgcgcacgctagagacggagggagggaaggaaggacagagcgcagagcttagaactcggatcctccggtcctcggtggagaggaggaagcagcccacggggcagggcctcccaggctctgtacggacagcatgagtttcccgcgaggctcccaggatcggtccgtgggcaactccagcccgtggtggcctctaaccaccgagggctccaacggcagtcaggaggcagccaggcttggggaaggtgacagcccgctgggggacgtacgcaatgaggagctggccaaactggaaatcgctgtgctggcagtgatttttgtggtggctgtgctgggcaatagcagtgtgctgctggcgctgcatcgcacgccacgcaagacatcccgcatgcacctctttatccgacacctcagcctggcagacctggcggtcgccttcttccaagtattaccgcagctatgctgggacatcacctaccgcttccgcgggccggactggctgtgccgcgtggtgaagcacctgcaggtgtttgccatgttcgcgtctgcctatatgctggtggtgatgacagccgaccgctacatcgccgtgtgccacccgctcaagaccctgcagcagccggcgcgccgctcgcgcctcatgatcgccacctcttgggtgctgagtttcatactaagcacgccacagtactttatattctctgtgatcgaaatcgaggtgaacaatggcactaaaacccaagactgctgggctaccttcatccagccctggggtacccgcgcctacgtgacctggatgaccagcggtgtcttcgtggcacctgtggtcgtcttgggtacatgctatggcttcatctgctaccacatctggcgcaacatccgcggaaagacagcgtcctcgcgacacagcaagggtgacaagggctctggggaggccgtgggtccctttcataaggggcttttggttacaccttgtgtcagcagcgtgaagagcatttcccgcgccaagatccgcactgtgaagatgacctttgtgattgtaagcgcctacatcctttgctgggcgcctttcttcattgtccagatgtggtcagtctgggatgagaatttcatctggaccgattcagaaaacccttccatcacaatcacggcgttgctggcttccttgaacagctgctgcaacccgtggatatacatgtttttcagtggccatctcctgcaagactgcgtccaaagtttcccatgctgccacagcatggcgcagaaattcgccaaggatgactccgatagcatgagccgaagacagacttcttattctaacaaccggagcccaacgaacagcactgggatgtggaaggactcgcccaaatcttccaaatccatcagattcattcctgtctccacttgagccccacgttcacgcagcccgactcttgggagggacttttgtgtccagctagagatcgtaagagcagatgtgtttatgtg

SEQ ID NO: 790 - DNA, 770 bp, Homo sapiens
  misc_feature (1)..(1): n is a, c, g, or t
nctcttcctgggccggtgcctctgagtgtcttcggcatggcgctgcacatggttcttgtcgttttgagcctcctgcccttgttggaagctcagaacccagaacctgccaacatcaccctaggcatacctattaccaatgagaccctgaaatggctctcagacaaatggttttacatgggagcagctttccgagaccccgtgttcaagcaggcagttcaaacgatacagacggaatatttttaccttacccccaacttgataaacgacacaattgaacttcgggagtttcagaccacagacgaccagtgtgtctataacttcacccatctaggagtccagagagagaatgggaccttatccaagtgtgcaggagcagtgaaaatctttgcccatttgatagtgctgaagaaacatgggaccttcatgcttgcctttaacctgacagatgagaaccgggggctgtccttctatgctaaaaagccagacttgtccccagagctgcggaaaatattccagcaggctgtcaaagatgtgggcatggatgaatcagaaatcgtatttgtcgactggacaaaggataagtgcagtgagcagcagaagcagcagctggagctggagaaggagactaagaaggagaccaagaaggatccttaggccaagcatgaactcagctctctgaactccggggactgtccccatgcccactctacccccactcctgtgcacctcgattctattttccacaataataaaggtttggttaaacaatc

SEQ ID NO: 791 - DNA, 1090 bp, Homo sapiens
gttacggaagtagttcccgctgcttatgccatggtcctggaactgtacctggatctgctgtcgcagccctgtcgcgctatttatatcttcgccaagaagaacaatatcccgttccagatgcatactgtggagctgcgcaagggtgagcacctcagcgatgcctttgcccaggtgaaccccatgaagaaggtaccagccatgaaggatggtggcttcaccttgtgtgagagtgtggccatcctgctctacctggcgcacaagtataaggttcctgaccactggtacccccaagacctgcaggcccgtgctcgtgtggatgagtacctggcatggcagcatacgacccttcggagaagctgtctccggaccctgtggcataaggtgatgttccccgttttcctgggtgagcagatacgcccggagatgctggcagccacattggcagatctggatgttaacgtacaggtgctggaagaccagttcctccaggacaaagacttccttgtcggaccgcacatctccctggctgacgtggtagctatcacagagctgatgcatcctgtaggtggtggctgcccagtctttgaagggcgtcccaggctggctgcatggtacaggagagtggaggcagctgtggggaaggacctcttcctggaggcccatgaggtcatcctgaaggtgagagactgtccacctgctgaccccgtcataaagcaaaagctgatgcccagagtgctgaccatgatccagtgacgtcagaagcttcatccctgcaccagccaggccactcgcattacacgactgtgcgccccagccctcacggcatgatggtttctgggcgagggtccctcttcacccttttcccatgctagccacccatggtcacaactacaaccactacttttccctttgagtttgggcaataaaccgaggctcgattcgagctttaaaaaaaaaaaaaaaaaaaaaaaaaaaaaaaaaaaaaaaaaaaaaaaaaaaaaaaaaaaaaaaaaaaaaaaaaaaaaaaaaaaaaaaaaaaaaaaaaaaaaaaaaaaaaaaaaaaaaaaaaaaaaaaaaaaaaaaaaaaaaa

SEQ ID NO: 792 - DNA, 1484 bp, Homo sapiens
tgtgtggtctttgcagctcgccatggctaggacagtagtagcactaaatatcctggtattgctgggcctgtgctggtccctggctgttgccaaccctcttcctgctgcccatgagactgttgctaaaggtgaaaatgggaccaagccagactcagatgtaatcgaacactgctcagatgcctggagctttgacgctaccaccatggatcacaatgggaccatgctgttctttaaaggggagtttgtgtggaggggtcactcagggatccgggagttaatctcagagaggtggaagaatcccgtcacctcagtggatgctgcattccgtggtcctgacagtgtcttcctgatcaaggaagacaaagtctgggtgtatcctcctgaaaagaaagagaacgggtatccaaagttgttccaagaagagtctcctggaatcccatacccaccagacgcagctgtggaatgccaccgtggagaatgccagagtgaaggtgtcctcttcttccaaggtaaccgcaagtggttctgggactttgccacaagaacccaaaaggaacgttcctggcctgctgttgggaattgcactgcggccttgaggtggcttgaacgctactactgcttccagggtaacaagttcctgagatttaaccccgtcacaggagaggtgcctcccagataccctctggatgcccgtgactacttcatatcctgccctggcagaggccatggtaaactaagaaatggaactgctcatgggaatagcacccatcctatgcattcgcgttgtaacgcagatcctggcctgtctgcactgctgtctgaccatcgaggtgccacctatgccttcagtggctcccactactggcgtctggactccagccgtgatgggtggcatagctggcccattgctcatcactggccccagggtccttcagcagtagatgctgccttttcctgggatgagaaagtctatctgatccagggcactcaagtatatgtcttcctgacgaaggggggcaataacctagtaagtggttatccaaagcggctggagaaggaacttgggagccctcccgggatcagccttgataccatagatgcagccttttcctgccctggttcttccaagctctacgtcacatcaggacggcggctttggtggctggacctgaagtcaggagcccaggcgacatgggcagagctttcctggccccatgagaaagttgatggtgccctgtgtttggaaaagtcccttggtccctactcatgctcttccaatggtcccaacttgttctttatccatgggcccaatttatactgctatagcagtatagacaaactgaatgcagccaagagtctgcctcagccccagaaagtgaacagcatccttggctgcagtcaataaaaagccctgatgggaattagcccagcccaccccacctctccatttccattctaataaaaccagatggtttcttcacatg

SEQ ID NO: 793 - DNA, 805 bp, Homo sapiens
ggggagatgcgccacggcttcggtagcgaccggctgtccactgctgcttgagcggcgccagcaccttccctaggagctcgcagcagccggctggcccctgctccacggtaaccatgtgcgaccggaaggcggtgatcaaaaatgcagacatgtcggaagagatgcaacaggactcggtggagtgcgctactcaggcgttggagaagtacaacatagagaaggatatcgcggcccatatcaagaaggagtttgacaagaagtacaaccccacctggcactgcatcgtgggccggaacttcggtagctacgtgacacacgagaccaaacacttcatctacttctacctgggtcaggtggccattctcctgttcaaatctggttaatagcatggactgtgccaaacacccagtgatccatccaaaaacaaggactgcatcctaaattccaaataccagagactgaatcttcagccttgctaagggaacacctcgtttgaatctgttgtgttttgtacagggcaccattctctgtacacgtttgtggttataaaattagtaaaacagcttacatttgtatttattttctagtccatacttctgtacccccatttttttctcccttaggtcattcctttaaaataaatctgttggagatgtaaaaaaaaaaaaaaaaaaaaaaaaaaaaaaaaaaaaaaaaaaaaaaaaaaaaaaaaaaaaaaaaaaaaaaaaaaaaaaaaaaaaaaaaaaaaaaaaaaaaaaaaaaaaaaaaaaaaaaaaaaaaaaaaaaaaaaaaaaaaaaaaaaaaa

SEQ ID NO: 794 - DNA, 1812 bp, Homo sapiens
atggccctgaggacaggaggcccagccctggtggtgcttctggctttctgggtggcactgggcccctgtcacctgcaggggacagatcccggagcgtcggcagatgccgagggcccccagtgccccgtcgcctgtacctgcagccatgatgactacacagatgagctcagcgtcttttgcagttcaaagaacctcacacatctgcctgatgacatcccagtcagcaccagagccctgtggcttgatggcaacaacctctcttctatcccctcagcggccttccagaacctgtccagcctggactttctcaacctgcagggcagctggctgaggagcctggagccacaggcactgctggggctgcagaacctctactatctgcacctggaacggaaccggctccggaacctcgccgtgggcttgttcacacacacaccgagtctggcttcactcagcctgagcagcaacctcttgggccggctggaggaagggctgttccagggcctcagtcacctttgggacctcaacctgggttggaacagtctagtggtcctgcctgacacagtgttccagggactgggcaacctccacgagctggtgctggctggcaacaaactgacttacctgcagcctgcgctcttctgtggcttgggcgagctgcgggagctggatctgagcaggaacgcactccgaagcgtcaaagctaacgtctttgtacatttgcccaggctgcagaagctgtacctggaccggaacctcattacagccgtggcccctcgtgcctttctgggcatgaaggccctgcgttggctggacctgtcgcacaaccgcgtggctggcctcatggaggacaccttcccaggcctgctgggcctgcacgtcctgcgcctggcacacaatgcgatcgctagcttgcggccgcgcactttcaaagacctgcacttcctggaggaactgcagctgggccacaatcgaatcaggcagctcggggagaggacattcgagggcctggggcagctggaggtgctgacgctcaatgacaaccagatcactgaggtcagggtgggcgccttctctggccttttcaatgtggcggttatgaatctctccggcaactgtctgaggagcctcccggagcgggtgtttcagggtctggacaaactgcacagcctgcacctagagcacagctgcctgggtcacgtccgcctgcacacttttgctggcctctcagggctgcgcaggctcttcctcagggacaacagcatctccagcatcgaagaacagagcctggcagggctttcggagctcctggaactggatcttactaccaaccgcctcacacatctgccccgccagctcttccagggcctcggccacctggagtacctgcttctctcctacaaccaactgacgactttatccgcggaggtcctgggccctctgcagcgggccttctggttggatatctcacacaaccacctggagacgctggccgaaggccttttctcatctctggggcggcttcgctacctcagcctcaggaataactccttgcagaccttttcaccacagcccggcctggagcgcctgtggcttgatgccaacccctgggactgcagctgtcccctcaaggcgcttcgagactttgccctgcagaaccctggtgttgtcccccgctttgttcagactgtctgtgagggggacgactgccagccggtgtacacctacaacaatatcacttgcgctggccccgccaacgtctcgggcctcgacctaagagacgttagtgaaacacattttgtgcactgctga

SEQ ID NO: 795 - DNA, 1812 bp, Homo sapiens; identical to SEQ ID NO: 794

SEQ ID NO: 796 - DNA, 1812 bp, Homo sapiens; identical to SEQ ID NO: 794

SEQ ID NO: 797 - DNA, 780 bp, Homo sapiens
gacgccatgcgccctgggcgtgatggagcaccagcagcagcaactgagaaacttgcgagactttctgttggtctacaatcggatgacagaactgtgcttccagcgctgtgtgcccagcctgcaccaccgagctctggacgctgaggaggaggcctgcctgcacagctgtgctgggaagctcatccattctaaccaccgcctcatggccgcttacgtgcacctcatgcccgccctggtccagcgccgcatggcggactacgaggctgcctctgccgtgccaggtgttcctgcagaacagcccagagactcgccatcaggcagctagctagctgtccctgaccgcaggagagaaggtggttttgctgtgggcacattggtcttcaatacgatcctcctgtctcagcctcccaggaaggtggagacccaggatattgtgtgactgctgagagagctctacatcagcatctgtatgtatcccttcaataaacatgtgctgtgagttactggaattacagacatgggctacaactggttgctagataattctttaggaatataaaaattgctgaccagaagcttccctacagagtgacctgtgtacatgattaatttcactccttgacaagtacaaacgtgagtagagcagcttgtgaacttaattccccaaaccaggaaggtggagacccaggatattgtgtgactgctgagagagctctacatcagcatctgtatgtatcccttcaataaacatgtgctgtgaaaaaaaaaaaaaaaaaaaaa

SEQ ID NO: 798 - DNA, 3573 bp, Homo sapiens
cctcacattcggtcgccaaactggaggagcgacggaagcccgatcccaggaggatggaggatgaagctgtcctggacagaggggcttccttccttaaacatgtgtgtgacgaagaagaagtagaaggtcaccacacgatctacattggggtccatgtgcccaagagctaccggagaaggagacgccataagagaaaggctgggcacaaggaaaagaaggagaaggaaaggatctctgagaactattccgacaaatcagatgtggagaatgcggacgaatccagcagcagcatcctcaagccgctcatctccccggccgcagaacgtatccgattcatcttgggagaggaagatgacagcccagcacctcctcagctcttcacggaactcgatgagctgctggctgtggatggacaggagatggaatggaaggagacagccaggtggattaagtttgaagagaaagtggaacagggtggggagcgatggagcaaaccccatgtggccaccttgtccctgcacagcttgtttgagctgaggacatgtatggagaaaggatccatcatgcttgaccgggaggcctcctctctcccacagctggtggagatgattgcagaccaccagatcgagacaggcctcttgaagcccgacctcaaggataaggtcacctatacgctgctgcggaaacaccgacatcaaaccaagaaatccaaccttcggtccctggctgacattgggaagacagtctccagtgcaagtaggatgttcagcaaccctgataacggtagcccagctatgacccacaggaatctgacatcctccagtctcaatgacatttctgataaaccagagaaggaccagctgaagaataaattcatgaaaaaactgccccgtgatgcagaagcttccaacgtgctcgttggggaggttgacttcttggacactcccttcattgcctttgttcgtctacagcaggctgtcatgctgggtgccctgactgaggtgcctgtgcccacaaggttcttgttcattctcttaggtccaaaggggaaagccaagtcctaccatgagatcggaagagccatcgccaccttgatgtctgacgaggtgttccacgatatcgcttacaaagcgaaagatagacacgacctgattgctggcattgacgagttcttagatgaagtcattgtccttccacctggggaatgggacccggcaatcagaatagaacctccaaagagcctcccatcatctgacaaaaggaagaatatgtactcaggtggagagaacgttcagatgaatggggacacacctcatgatggaggccacggaggaggaggccacggtgactgtgaagaactacagagaactggccggttctgtggtggattaattaaggacataaagaggaaagcaccattttttgccagtgacttttatgacgctttaaatattcaggctctctcggcaattctcttcatctatctggcgacggtaaccaacgccatcactttcggaggcctgctcggggatgccactgacaacatgcagggtgtgttggagagtttcctgggcactgctgtctctggcgccatcttttgcctttttgcgggtcaaccgctcaccatcttgagtagcacgggacctgttctggtgtttgagaggcttcttttcaacttcagcaaggaccatagttttgactacttggagtttcgtctttggattggcctgtggtcagccttcatgtgtctcatcctggtggccactgatgccagcttcctggttcagtacttcacccgtttcacggaagaaggattctcctctctgatcagcttcatcttcatctatgatgctttcaagaagatgatcaagctggcagattactatcccatcaactctgacttcagagtgggctacaacactcacttctcctgtgcttgcctgccacctgacccagttaatctctcagtatctaatgataccacactagccccagaggacctgccaaccgtttcttctactgacatgtaccacaatgctacctttgactgggcctacttgtcaaagaaagagtgtgtgaaatttggaggaaagctcgtgggaaacaactgtgacttcgtgcctgacatcacactcatgtccttcatcctcttcctgggcacttacacctcttctatggccatgaagaaattcaaaaccagccgctattttccaaccacagcaagaaaactgatcagcgattttgccatcatcctgtccattctcatattctgtgtaatagacgccctcgtcggtgtggatactccgaagctaattgtgccaagtgagttcaagccaacaagccctcaccggggttggtttgtcccaccctttggaggaaacccctggtgggtgtgccttgctgctgctatcccggctttgctagtcaccatcctgattttcatggaccagcaaatcacggccgtgattgtgaacaggaaagaacataagctcaagaagggagctggctatcacctggacctgttttgggtcgccatcctcatggtggtgtgctccttcatggctcttccctggtatgtggctgctactgtcatctccatcgctcacatcgacagtctgaagatggagacagagacttctgcgcctggagaacaaccaaagtttctgggagtgagagaacaacgagtcactggaacccttgtgtttattctgactggcctgtcagtctttatggctcccatcttgaagtttatccccatgcctgttctgtatggcgtgttcttgtatatgggggtggcctcactgaacggtgtgcagttcatggaccgtcttaagctgcttctcatgcccctgaagcatcaacctgacttcatctacctgcgccacgtccccctgcgccgagtccacctgttcacctccctgcaggtgttgtgcctggctctgctctggatcctcaagtccacagtggctgcgattatttttccagttatgatcctggccctggtagctgtcagaaaaggtatggactacctcttctcccagcacgacctcagcttccttgatgatgtcattccagagaaggacaagaaaaagaaggaggatgagaagaagaagaaaaagaagaaaggaagtctggatagcgacaacgacgattctgactgcccatactcagaaaaggtccccagtattaaaattccaatggacatcacggaacagcaacctttcctaagtgataacaaacccttggacagagaaagatcctcaacattccttgaacgccacacatcatgctgataaaattcctttccttgagtcactgggtttacccagtcctccaagatctccagtgaaagtcgtgcctcaaattagaatagaacttgagtctgaagacaacgattatctttggaggaacaagggaacagaaaccacgttgtaacctgttagtcattctcaaaactgacagttctgttgttaactgttctaattttttttttgtctatgtattttaaaaacttttgtttggtcactgactgaataatacagtcactctctctgcttctctcttgcataggta

SEQ ID NO: 799 - DNA, 1314 bp, Homo sapiens
atgtctggtttgtctggcccactatcctggcctggccctctcctatccgccttgctctttctgttccttctcggccccagctcggtcctcggcatctccttccatctacccgtgaactctcgcaagtgtctccgcgaggagatccacaaagacttgctggttacgggcgcgtacgagatcaccgaccagtctgggggcgctggcggcctgcgcacccacctcaagatcacagattctgctggccatattctgtatgccaaagaggatgcaactaaagggaagtttgcctttaccacagaagactatgacatgtttgaagtatgctttgagagcaagggaacagggcggatacctgaccaactagtgattctagacatgaagcatggagtagaggcgaaaaattatgaagagatcgcaaaagttgagaaactcaaaccactggaggtggagctacggcgcctcgaggacctttcagagtctattgttaacgactttgcctacatgaagaagcgggaagaggagatgagggacaccaacgagtccacaaacacccgcgtcctgtacttcagcatcttttccatgttctgcctcattggactagccacctggcaggtcttctacctgcgtcgcttcttcaaggccaagaagttgatagagtaatgaggctcagtcttctgtcccctggagccagcagaacatcgctgggacgtgcctggcctagcccaaggccaagttactaacagtatatcaaggcgcacgtgagcatcttgccagaactgatccttctggtgtgggagagcatgggcaccacccacacccagcaagtcagagaggactttttaatgcagtaggatttggactggtttgcaacaagattattaaagtcgcctatggaaaaacaaaacaaaacaaaacaacaaacaggggttacctagataacgccaaagccagcattcgtcctgggtcgcctcacaggatcggtttgagctgtttgctttttctctcccacttgctcaccgccttggtcctccactctagttctcctccaagatttctctgacctcggtcagctccttcatatcagttgtctctttggtttccttgtgaaacaccttgaacttctcttggtccttagatgaaatgtttacagagcttctggtgatatccttcataattttatgtcttctaaaagggtcatgggtgggacacaaaacaaagtgagctttgaactgtagataatctcttaaaagaaaatctcattttagaccattaaaatgtttgtgctcaaaaaaaaaaaaaaaaaaaaaaaaaaaa

SEQ ID NO: 800 - DNA, 1194 bp, Homo sapiens
agagagagagagagagagagagagagagagaacccacccacccggcgactaatctgatcccggctgtcccccgggaccagcgaggtcccagaagacccacgagggagcgggcgtaacgcgtggctgcgggtgggagccatggacgccttcatccgagtcgccaaccaaagccaaggtcgggaccgacttttcagagccactcaacacgcatgcatgttgcttagatatttgttagagtctaaggctggcaaagaggcggtggtaacgaagctcaagaatctggagactagtgtgagcactggccgtaaatggttcagactaggcaacgtgctccatgccatccaggccactgagcagagcatccaagccactgaccttgtgccccgcctatgcctaacattagccaacctgaaccgcgtggtttattacatctgtgacactgtcctctgggcgaagagtgtgggtctgacatctggaatcaacagagagaagtggcaaatgcgggcggcccgccactactactatttcctcttgctgagcctggtccgggatctgtatgaggtcttgctgcatatgggacaagttgcacgcgacagagcaaagagagagaagtcctccggggaccctcctaagtacagcgtcgctaatgaagaaagtgaatggctccagtccttcctcctcctcctcttccagtctctaaagcgaaatccgcccttattcctggacaccgtgaagaacttctgtgacatcctgatccctttgaaccagctcgggatctacaagtccaaccttggcgtggtaggatttggaggtctcgtgtcctctgtggctggcctcatcactgtggtgtatcctcagttgaaactgaaggcccgctagggtgtttggaaaatttaagactgacgttcagtggagcaaacatttgcttttgtcatgatgtctactgtacttaattttttttaatcatgtgagcatcttaccaaccggtgatgtgagcagaggtaggacccacaacggagcctgaagactgatgacgtttttgtaaacacggcagtaacttctgcacatttccccttcagtgacttctgactactgcaaaaacatttgtgccgtcattgaagacgtgtaaaggggaagtcagaacattgctgagcatcttttctgtacatagtaagagctcatatatctaacaaa

SEQ ID NO: 801 - DNA, 1194 bp, Homo sapiens; identical to SEQ ID NO: 800

SEQ ID NO: 802 - DNA, 2737 bp, Homo sapiens
ctgggacacagttgtccaggtgctgttggccagtcccaacatggaccataaggaaataatccttctgtttctcttgtttctgaaaccaggacaaggggactcactggatggctatgtaagcacacagggggcttcactgcatagcctcaccaagaagcagctagcggcaggaagcatagcagactgtttggccaaatgtgaaggggaaacagacttcatctgcaggtcattccagtaccacagcaaagagcagcagtgcgtgatcatggccgagaacagcaagacttcctccatcatccggatgagagatgtcatcttattcgaaaagagagtgtatctgtcagagtgtaagactggcatcggcaagggctacagaggaaccatgtccaagacaaagactggtgttacctgtcaaaagtggagtgacacgtccccccacgtacccaaatactcccccagcacacaccccagcgagggactagaggagaactactgtaggaacccagacaatgatgaacaagggccctggtgctacacaacagacccggaccagagatatgagtactgcaacatccccgaatgcgaagaggaatgcatgtactgcagtggagaaaagtacgagggcaaaatctccaagaccatgtctggactcgactgccagtcctgggattctcagagcccacatgctcacggatacatccctgccaaatttccaagcaagaacttgaagatgaattactgtcgcaaccctgacggggagccgcggccctggtgcttcaccacagaccccaacaaacgctgggaatactgtgacatcccccgctgcacaacacccccacccccaccgggcccaacctaccaatgtctgaaggggagaggtgaaaattaccgagggaccgtgtctgtcactgcgtctgggaaaacctgtcagcgctggagtgagcaaacacctcataggcacaacaggacgccagaaaacttcccctgcaaaaatctggaagagaactactgccggaacccagatggagaaactgctccctggtgctataccactgacagccagctgaggtgggagtactgtgagattccgtcctgcgggtcctcggtatcaccagaccagtcagattcctcagttcttccggagcaaacacctgtggtccaggagtgctaccagggcaatggaaagagctatcggggcacatcgtccactaccaacacagggaagaagtgccagtcctgggtatctatgactccacatagtcactcgaagaccccagcgaacttcccagatgctggcttggagatgaactactgcaggaacccagataatgaccagaggggcccttggtgcttcaccactgacccgagcgtcaggtgggaatactgcaacctgaagcggtgctcggagacaggagggggtgttgcggaatcagccatagtcccccaagttcccagtgcgccaggcacctctgagacagactgcatgtatgggaatggcaaagaatatcggggcaaaacggccgtcactgcagctggaaccccctgccaggaatgggctgcccaggagccccacagtcacagaatcttcaccccacagacaaacccacgggcaggtctggaaaagaattactgccgaaacccggatggggatgtcaatgggccctggtgctatacaatgaaccccagaaaactttacgactattgtaacattcccctttgtgcatcattatcgtcctttgaatgtgggaagcctcaggtggagccgaagaaatgccctgggagggtggtgggtggctgtgtggccaaccctcactcctggccctggcaaatcagccttagaacaagattttctggacagcacttctgtggcggtactttaatatccccagagtgggtgctgactgccgctcactgcttggagaaatcttcgagacctgaattctacaaggttatcctgggagcacacgaagaacgaatccttgggtcagatgttcagcaaatagcagtaaccaaactggtcttggaacccaacgacgctgacattgccctgctgaagctaagccgcccagccaccatcacagataatgtcatcccagcttgtctgccatctccaaattatgtggttgccgaccggacactgtgttacatcaccggctggggagaaacgaaagggactccaggtgccggccgtctcaaggaggcccagctgcccgtgatcgagaacaaggtgtgcaaccgcgctgagtatctaaacaacagagtcaaatccaccgagctctgtgccgggcatctggctggtggcatcgacagttgccagggcgacagtggaggacctctggtttgcttcgagaaggacaagtatattttacaaggagtcacttcttggggtcttggctgtgctcgccccaataagcctggtgtctatgttcgtgtttcccggtacgttaattggattgaaagggagatgaggaatgactaattgggtgggaggcagaacaaaactactaaatatggggaggggattagggcgcttgaaaaaaaacctgacagcaatcaaaccaaagacactacactggaccactacttcctgtcacccctcagctcctccctctttttgtattattgtgggtaaaattttcctgtccctggacttctggattttgtgacaatagaccatcacttctgtgacctttgttgaaaataaactcgatacttactttaaaaaaaaaaaaaaaaa

SEQ ID NO: 803 - DNA, 2005 bp, Homo sapiens
tcagaagcgggtgtcaccaacagcaaacgtgcgaccaactcttcggctagtgaatctctaagccgcgaagagtgctttgaagtagctttaggtggaagatgtcagaaagtaactcggcagagggtagcgacagaagcgaggagcaggtgtctggtgctaaagtcatcgcccaggccctaaaaacgcaagatgtggagtacatgttcggtgtcgtaggcatccccgtgaccgaaatcgcccttgctgcccaggaactgggcatcaagtacattgggatgaggaatgagcaagcggcttgttacgctgcctctgcggttggatacctaacgggcaggccaggagtatgcctcgttgtttctggtcccggcctcatccacgccttgggcggcatggcgaatgcaaacatgaactgttggcccttgattgtgattggtggttcttctgaaaggaatcaagaagcaatgggagccttccaggagtttcctcaggttgaagcttgcagattatattccaagttctctgcccggccaagcagcattcagcacattccttttgttattgaaaaggcagtgaggagcagtatctacggtcgcccgggagcgtgttacattgatgttcctgcagaccttgtgaccctccaggagagcacgacttctataaagtacaaggaatgctgcatgccacctccacttagcctggcagaaacctctgctgtgcgtgcggcagcctctgttcttaggagcgccaagcagcccctgctcatcatcgggaaaggcgctgcttattcccatgcagaggacagcatccggaagctggtggagctgtgcaatctgccatttttacctactcccatggggaagggtgtcgtccctgacaaccacccaaactgtgtgggtgcggccagatccagggctttgcagtttgctgatgtgattgtgttatttggtgcaagactcaactggatattacattttggactgccgccaaggtaccaggcagacgtgaagtttattcagattgatatctgtgcagaagaactggggaataatgtaaggccttcggtgactttgctaggagatgtaaatgctgtttctaaacagcttttagaacagtttgttaaaaatccatggcagtaccccacagacagcaaatggtgggagactctgagggagaaaaggaagaacaatgaagccgtatccaaggaattagcttccaaaaaatccctccctatgaattattacacagtgttctaccatgttcaagaacagttgcccaggaactgtttcatagtgagcgaaggagcaaacaccatggacattggacggactgtgcttcagaactaccttcctcgtcaccggctggatgccggttcctttggaacaatgggagttggtttgggatttgccattgcagctgctgtggtggctaaggagagaagccctgggcagcgggtcatctgtgtggaaggagacagtgcctttggattttccggcatggaagtggaaaccatctgcaggtacaacttgccaatcataatcttggtagtgaacaataatggaatttaccaaggttttgatgctgacacctgggggaaaatattaaattttcaaggaactgctacaacaatccctccaatgtgtctgcttccaaactcacactacgagcaggtcatgactgcatttggaggcaaagggtattttgtacaaacgccagaagagctccaagactcgctgaggcaggctctgaaagacacaagtaaaccgtgtcttatcaacatcatgattgaaccacaaagtactcggaaggcccaggattttcactggctcacccgttccaacatatgaataaactacttggcgttttttgaggcattttctctttcctacaaggtagaattaccttttcatagcaaaattaccacaatgctaacattgtatttaaaaatacactttaaattgtcttttatagtaaagaaattgattaaagctgtcattatttgttaaaa

SEQ ID NO: 804 - DNA, 660 bp, Homo sapiens
atggcgacattgacagtggtccagccgcttactctggacagagatgttgcaagagcaatcgaactactagaaaagccacaagaatccggagaagtaccagtgcacaagctgcagtctctcaaaaaggtgcttcagagtgagttttgtacagcaatccgagaggtgtatcaatacatgcatgaaacgattactgttaatggctgccctgaattccgtgcgagggccacagcaaaggcaacagttgcggcttttgcagccagcgaaggccactcccaccctcgggtagtcgaactgccaaagactgatgaaggcctgggttttaacgtgatgggaggaaaggaacagaattctccaatttacatctcccgcatcatccctggaggggtggctgaaagacacggaggcctcaaaagaggagaccagttgctatcagtgaacggagtgagcgtggaaggggaacatcacgagaaagctgtggaacttctcaaggctgctaaggacagtgtgaagctggtcgtcagatacaccccaaaagtcctggaggagatggaggctcgttttgaaaagctgaggacagctcggcgtcggcaacagcaacagttgcttattcagcagcagcagcagcagcagcagcagccacaacaaaaccacatgtcatag

SEQ ID NO: 805 - DNA, 660 bp, Homo sapiens; identical to SEQ ID NO: 804

SEQ ID NO: 806 - DNA, 660 bp, Homo sapiens; identical to SEQ ID NO: 804

SEQ ID NO: 807 - DNA, 1910 bp, Homo sapiens
gtccaagggtccatgtggtaagcagactgaaccgtcctagataccaaagagggacaccttgtgggtgggtagcatgggcttcgaagacctgctggacaaggtgggcggctttgggcccttccaacttcggaatctggttctgatggccctgccccgaatgctgctccccatgcactttctcctgcccgtcttcatggccgctgtgcctgcccaccattgtgccctgcccggtgcccctgccaacctcagtcaccaggacttatggctggaagcccatctaccccgggagactgacggcagctttagctcctgcctccgatttgcctatccccagactgtccccaatgtcactttggggacagaggtgtccaactctggggagcctgagggtgagcccctcacggtgccctgctctcagggctgggagtacgaccgctcagaattctcctccaccattgcaactgagtgggatcttgtgtgtcagcagagaggactgaacaaaattacgtccacctgcttcttcattggtgtgctggtgggagccgtggtgtatggatacttgtctgacaggtttggcaggcgccggcttctgctggtggcctacgtgagctccctggtgctgggtctgatgtctgcagcctccatcaactacatcatgttcgtagtcacccgtacactcaccggctcagccctggctggcttcaccatcattgtgctcccactggagttggagtggctggatgtggagcaccgcactgtggccggggtcatcagcaccgtcttctggtcgggaggcgtgctgctgctggcactggtgggctacctgatccggagctggcgctggcttctgctggctgccaccctgccgtgtgtcccaggcatcatcagcatctggtgggttcctgagtctgcacggtggcttctaacccagggtcgtgtggaggaggcaaaaaaatacttgctgagctgtgccaagctcaatgggcggcccgtgggtgagggcagcctgagccaggaggccctgaacaacgtggtcaccatggaaagggcgttgcaaagaccctcatacttagacctgttccgaacatctcagctccgacatatctcactgtgctgcatgatggtgtggtttggagtgaacttttcctactacggcctgactctggacgtgtctgggctggggctgaacgtgtaccagacacagctgctgtttggggctgtggagctcccctccaaaattatggtctacttccttgtgcgccgtctgggacgccgtctcacggaggctgggatgctgctgggcgctgctctgacctttggcaccagcctgctggtatccttggagactaagtcatggatcactgctctggtggtggtggggaaagctttttctgaagctgcttttactacggcctacctgttcacgtccgagttgtaccctactgtgctcagacagacaggattgggacttactgcactcatgggcaggctaggggcctctctggcccgactggcggccttgctggatggagtgtggctgttgctgcccaaagttgcttacggggggattgccctggtggctgcctgcactgcactcctgctgcctgagacgaagaaggcacagctgccagagaccatccaggatgtggagaggaagagtacccaggaggaagatgtgtaggtccgggactgagttggactagcgacagttctccacaggagctgggcacagaaggcagcctcttgtgactgggacatcagactcctccacctaaggatggagctgctcctgatgccctctgcctgtgctctccagcagcagaacaacttcccgcagcactgggccgctgggattctggactcccctctcatggccgggggcttctataaataaagacggttgctcatgg

SEQ ID NO: 808 - DNA, 1435 bp, Homo sapiens
gaattccggcacagcgcacttgctctcgctcgaccgcgctcccgccccgcagtcctcaccaaccctacggatcctagccaccgccagcctaggagggcatcaggatgaaggcagcccgtttcgtgatgcgcagcgccagctcgctgggcaacgccggcctggtccccagggaggtcgagctgttctcccgctacagcccgtccccgctgtccatgaagcagctgctggacttcggttcagaaaatgcctgtgagagaacttctttttcttttcttcggcaagaattgcccgtcagacttgccaacatcctgaaggagattgacatcctccctgaacacttagtgaacaccccttccgtccagctggtgaagagctggtacatccagagcctgatggatttagtggagttccacgaaaagagcccagaagaccagaaagttctatcagactttgtagacacgctggtcaaagttcgaaacagacatcataatgtggtccctacgatggcacaagggatcctggagtacaaagacaactgcaccgttgaccccgttaccaatcaaaatcttcagtattttttggaccggttttatatgaaccgcatttctactcggatgctcatgaaccagcacatcctcatattcagtgactcaaagacaggaaacccaagccacattgggagtatcgaccccaactgcgatgtggtagcagtagtcgaagatgcctttgagtgtgcaaagatgctctgcgatcagtattatctaacgtcgccagaattaaagctcacacaagtcaatggaaaatttccaggccaaccaatccacatcgtgtacgttccttcacaccttcaccacatgctctttgaactattcaagaatgccatgagggccacggtcgagcatcaagaaaaccgccctttcctgacaccagtcgaggccaccgtcgtcttgggaaaagaagatcttacaatcaagatttctgaccgaggtggcggtgttcctctgaggattactgaccgcctctttagttacacatactccactgctccaacgcctgtgatggacaattcacggaatgcccctttggctggttttggttacggcttgccgatttcccgtctctacgccaagtattttcaaggagatctgaatctctattccatgtcaggctatgggacagatgccatcatctacttaaaggctttatcatctgagtctatagaaaaactccccgtctttaacaagtcagccttcaaacattatcagatgagttctgaggctgatgactggtgtatcccaagtaaggaaccaaagaatctgtcgaaggagaaactggcagtgtgacggggatctcgcctggcacttttacgggatcaaagtgggtctacggcagtgctgcttcgtgaatgtgtgtggactcttgtttccgcaaaaca

SEQ ID NO: 809 - DNA, 1414 bp, Homo sapiens
gcgcctccttgttcccagcgtcaccactgccgccatgcccggagggctgcttctcggggacgaagcccccaactttgaggccaataccaccatcggccacatccgcttccacgatttcctaggagattcatggggcattctcttttcccacccacgggactttaccccagtgtgcaccacagaacttggcagagctgcaaagctggcgccagagtttgccaagaggaatgttaagttgattgctctttcaatagactctgttgaggaccattttgcctggagcaaggacatcaatgcttacaatggtgcagcacccacagaaaagctaccatttcccatcatcgacgataaggacagggaccttgccatcctgttgggcatgttggatccagcagagaaggatgaaaaaggcatgcccgtgacagcccgtgtggtattcatttttggccctgacaagaaactaaaactgtccatcctctacccagccaccacgggcagaaactttgatgagattctcagagtggttgactccctccagctgacagcatcaaatccagttgccactccagttgactggaagaagggagagagtgtgatggtccttcccaccctccctgaagaggaagccaaacaacttttccctaaaggagtcttcaccaaagagctcccatctggcaagaaatacctccgttatacgccccagccttaagtctgcgggaactggggctgcaactgctcgaccagcactgggacctgaggatgacagctgacagctgcagttccgtagaaagattgtggcgtggtcacagccgaagtcgcgtaggtcgctcgctatactactggctcattaaatggaaatggcaccaaaacattctcgggattctttactctgtgccttcgccagcattctgcccctccatccatcacagcgccctgctgactggctttctttgaaacgaattatgtgttggtgactgcagggtctctgcagggtctgtgatcagcaaggtagtgtcagtgtgggctccatgctagaatgataaacatcttttgtaggtttccaaactgaatcttctgttacccattgtggagaaccataaagtggggagaaactttcaattctgtactttcagtaaataaagcaggggaggtggggggggggggagagttctctataggaaatccatggtgagtttctatcaaagtgggcttccaagaatgtgtggaagacagcacatgtacttcctggagtttccaggtctgctctctagtgatctgtgaatgtgaactcgccttatgaaagacaggcagtgacattgtttgccactaaatgtcctaaaggagtgggttgccatttctaaattctgctgtgtgaggttcaacaataaaatcctgattagaaaaaaaaaaaaaa

SEQ ID NO: 810 - DNA, 799 bp, Homo sapiens
cagcaggagttaggcgcgatgctttccactgccgcttaccgggacccggaccgagagctggtaatggggcctcagggctccgccggccctgtgcagatgcgtttctcgccttatgccttcaacggaggtactgtattggcaattgctggagaagatttttccatcgttgcttcagacactcggttgagtgaagggttttcaattcatacccgagatagccccaaatgttacaaactaacagacaaaacagtaattggctgcagtggctttcatggagattgtctcaccttgacaaagattattgaagcaagattaaagatgtacaagcattccaataacaaggccatgacaacaggggcgattgctgcaatgctgtctaccatcctgtactcacggcgtttcttcccttactatgtctacaacatcattgagggacttgatgaagaaggaaagggagccgtgtacagctttgacccagtaggctcttaccagagagactctttcaaagccggaggctcagcaagtgccatgctgcagccgctgctcgacaaccaggttggcttcaaaaatatgcagaatgtggagcatgtccccctgactctggacagagccatgaggctggtgaaagacgtcttcatttctgcagccgagagggatgtgtacactggagacgccctcaggatctgcatcgtgaccaaagagggcatcagggaggagactgttccccttcggaaagactgatgtggggccagggtttggagctgtggcacgtttgttttattaaaaagaaatgtaaagg

SEQ ID NO: 811 - DNA, 4469 bp, Homo sapiens
cgtgcggtcggagcgtagagctcagcgcagagcaccgggagccggagccttagcgggaggtgcatccaaagcccggccgttcggagcccgcgagcgatgatgtcatcctacaagcgggccacgctggacgaagaggatctggtggactcactctccgagggcgatgtgtaccccaatggcctacaggtgaacttccgcagcccccggagcggacagaggtgctgggcagctcggacctcggtggagaagcggctggtggttctggtgacgcttctggcagcagggctggtggcctgcctggcagccctaggcatccagtaccggacaagaacgcctccggtatgtctgactgaggcctgtgtctcagtgaccagctccatcctaaactccatggaccccacggtagacccctgccaggacttcttcagctacgcctgtggtggctggatcaaggccaaccccgttcccgacggtcactcacgctgggggaccttcagcaacctctgggagcacaaccaagccatcattaagcatctgctggaaaattccacggccagcgcgagcgaggcagagaaaaaggcgcaagtgtactaccgtgcgtgtatgaacgaaactaggatcgaggagcttcgggccaagcccctgatggagctgattgagaagctcggaggttggaatatcacaggaccctgggccaaggacaacttccaggacacgctgcaggtggtcacagcgcactaccgcacctcacccttcttctctgtctatgtcagtgccgactccaagaactccaacagcaatgtgatccaggtggaccagtccggccttggcttgccctccagagactattacctgaacaagacggaaaatgaaaaggtactgactggctatctgaactacatggtccagctggggaaactgctgggtggtggggacgaggactccatccggccccagatgcagcagatcctggattttgagaccgctctggccaacatcaccatcccccaggagaagcgccgggatgaagagctcatctaccacaaagtcacggctgctgagctgcagaccttggcacccgccatcaactggttaccctttctgaatgccattttttacccagtggagatcaatgagtctgagcccatcgtggtctacgacaaggaatacctcagacaagtctccacactcatcaacagcaccgacaaatgcctgctcaacaactacatgatgtggaacctggtacggaaaacaagctcctttctcgaccagcgctttcaggatgccgatgagaagttcatggaggttatgtacgggacaaagaagacctgtcttccccgctggaagttttgcgtgagtgacacagaaaacaacctgggctttgccctgggccccatgtttgtgaaagcaacctttgcggaggacagcaagaacatagccagcgagatcatcctggagatcaagaaggcattcgaggagagcctgagcaccctgaaatggatggatgaagatactcggaggtcagccaaggagaaggcggacgccatctacaacatgataggctaccccaacttcatcatggaccccaaggagctggacaaagtgttcaatgactacacagcagttcccgatctctactttgagaacgccatgcgatttttcaacttctcattgagggtcacagccgaccagctcaggaaagcccccaacagagatcagtggagtatgaccccgcccatggtgaacgcctactactcgcccaccaagaacgagattgtgtttccagctggaatcctgcaggcgccattttatacccgctcttcgcccaacgccttgaactttggtggtatcggggtcgttgtggggcacgagctgactcatgctttcgacgatcaaggccgggagtatgacaaggatgggaacctccggccctggtggaagaactcgtcggtggaggcattcaagcagcagaccgagtgcatggtacagcagtataacaactacagtgtgaacggagagcccgtgaatgggcggcacaccctcggggagaacatcgcggacaacgggggactcaaggcagcctaccgggcgtaccagaactgggtaaagaagaacggagctgagcagatactgcccaccctgggtctcaccagcaaccagctcttcttcctgggattcgcacaggtctggtgctcggtccgcacaccagagagctcccacgaaggcctcatcaccgatccgcacagcccctcccgcttccgggtcatcggctcactctccaactccaaggagttctcagaacacttccgctgcccgctcggctcccccatgaaccctcgccacaaatgcgaagtctggtaagggctgaagcgcagagaacacaggtggaagaagggaaggggcctgcagccagctcccgggaacagggccgcgctgtcaccctccttccagcccctcggccgagggccccttccccaccctggagggtatgcagccatcttgtctaagcctatgccagaggctcagcactggaagccaacatttgacccccttcgaagctccagcatcccagacacccttgagtgatgctataccgggcctttgggtgtgtcaagctggtggcttgccagccctgggcctcacactgacaatggcagtgggacaggaccctttgccacgtccaatgccagatataccacaataccactgtgtcaaatgctttaaagatatattttttggggagactattttttaagcattatggaatacactggaaatcttcagggaaaatgcatttaaaacacttttttttaaaaaaagattagtatatttattatgttctctcttttttttctaaacaacctgcggacaaaggaaaccccactgattgaccccaggggaccccaggctgttgagcaggccaccagtttgagcactgctttagcccattgttggtgtaattgcttgtgcagtcaggagatgtaggggccaggcagaaggggtggccagctgaagggcctgatttatgagcatggccttctctgtcctgtctccggagtccaaccatgggaaccccaacaaggacgggctgttacccaagttgatccctatggcagtacaaagccagagtaatggcctccgtacaaccgggggacccctgaacactctggacaacatcacaggagcccgtcggggctgagaccccacaccccatcagatgcacactattgtccaaagatgtcttgttttggtcccacctcttctggccttgggaccggttgcctctctgtagcagttctgacatcctgaagtggtcgccctctgtaccaggggaaaggggaaagagaaagcagtccagttctccctccaagctccgtagcctgtagttaccctggcttggctcctgggaccccttctctagtgccttaccccaggccacagcccctgagcccctttgaggaggcagcatttgtcttgctttctcagtggagcccccaagtgtcctgactagaagccaacaccatagccccactcccagaagccccagggtaccgtcccaaaccctacaggacagccattccacacattccccaccccacccccctctgcagcaggccaagactggaaggttcccagccccatcgggctccagggaatggcaggatgtcatccacccacagcatcacctaacagatatgtgggcctccactaagtggcgctcactgaggttttcatgactgctgtagggagcaagctcttgtgacctgtgtgtgaggagcgcagtagaagtgcccatcacagcccctggcaagtcatgcccccacatagcacaacacacacacacactcacctggaagccagagtcctccttggccaagacgcagagacagtgtagtctcggtcctgctagcgtagcgatagtcttagcactgggatggggagctgcaagcgggtgtctggcaaggttcttggtccctgtgaacacattcgaggtctcagctcttcggggaaaagtaacacaggaagcaggaaggtgctggagccacgccctgccacacaggggggaccttctgggtgggatcatctgccctttctatcccctcgccctgcttccccacaggtggccgtcctggatgccagtatctagaagcagggtcctgagctggagttagccatgcacgcattgctcagggtgtgcagggagccaaggcaggaaaacccaggctggttagggatggatgggtgcaaaagcagcatcccgacccctgtccctccagagatttgagaagggcagaattaggaagggcacccgccctcagaaagagccctcctctcaagcccggagtttccctgcaggcacaaggacatggggtttggaactggggactctatttttttgtattattgtgttttgtgctactgtagttttggtgtggcacctattataattaaaataaagtacttatacc

SEQ ID NO: 812 - DNA, 2454 bp, Homo sapiens
gacggaggcagctgaatgtggtgctgaaccaacaacatctagctacaaggggagccactcctccacccagcgactgtgactgttctcacaggtctgaatttcctgttggtattcacaaagatgctttttatttttaacttcttgttttccccacttccgaccccggccctgatctgcctcctgacatttggaacggctatcttcctgtggctgatcaacagacctcagccagtcttacctctcattgacttggacaaccagtctgtagggattgagggaggagcacggagaggcgctttccagaagaacaatgacctaatcctttattacttctcagacgccaagacgttgtatgaagttttccaaagaggacttgctgtgtctgacaatggaccttgcttgggatacagaaagccgaaccagccctacaagtggatatcctacaagcaggtgtctgatcgagcagagtacctgggctcctgtcttttgcataaaggatacaagccatcgcaggaccaatttattggcatctttgctcaaaataggccagagtgggtcatctccgagttagcctgttacacatattccatggtagctgtccccctgtatgacacactgggagcagaagccatcatctatgtcatcaacagagctgatatctccgtggtgatctgtgatacaccccaaaaagcaacaatgctgatagaaaatgtggaaaaggaccttaccccaggcctgaagacagtcatcctcatggaccctttcgatgatgacctgatgaaacgaggagagaagtgtggcattgagatgttgtctctgcatgatgctgagaatctaggcaaagagaacttcaaaaaaccaatgcctccgaacccagaggatctaagtgttatctgtttcaccagtggaactacaggtgaccccaaaggagctatgctgacccatcaaaatatcgtttcaaacatggctgctttcctcaaatttctggagcctatcttccagcccacccccgaggatgtgaccatatcctaccttcccttggcccatatgtttgagaggcttgtccagggtgtcatattttcctgtggaggcaaaattgggttcttccaaggagatatccggttgctacctgatgacatgaaggctttgaaacccacagtgtttcccacagtgcctcgactccttaacagggtctatgataaggtacaaaatgaagccaagacacctttgaaaaagttcttattgaacttggctatcatcagcaaattcaacgaagtgagaaatggcatcattcggcggaacagtttgtgggacaagctcgtgttttcaaagatccaaagcagcctgggtgggaaggttcgtctcatgatcactggagccgcccctatctccactccagtcttgacgttcttcagggctgcaatgggatgctgggtgtttgaagcttacggccaaacagaatgcacagctgggtgttccattacatcacctggggactggacagcaggtcatgttgggactccggtgtcctgcaattttgtcaagctggaagatgtggctgacatgaactacttttcagtaaacaacgaaggcgagatctgcatcaaaggcaacaatgtgttcaaaggctacctaaaggacccagagaagacacaggaagtactggacaaggatggctggcttcacactggggacatcggtcgctggcttccaaatggaactctgaaaatcattgaccggaagaagaatattttcaaattggcacaaggagaatacatcgctccagagaagattgaaaatgtttattccaggagcagaccaatattgcaagtttttgtccatggggagagcttacggtcattcctgataggagtggtggttcctgacccagagtcacttccctcatttgcagccaagatcggggtaaagggatcctttgaagaactatgccaaaaccagtgtgtaaagaaagccattttagaagatttgcagaaagttgggaaagaaggtggccttaaatcctttgagcaggtcaagagcatctttgtgcatccggagccgttctcaattgaaaacgggcttctgacaccgacactgaaagccaaacgagtggagcttgccaagttcttccagacacaaatcaagagcctctatgagagcatcgaagagtaacttaaggttgctgagctggaagcggtgggggacgaagcggaaactatgtccagcgaacttttccagtaaatgaagcaatcactaaaggactgtcctgagttgggagcaaagcaacgtggacgagctcgatgtgacgcctgcactgcaggcgtcttctgtgatggaagctctggatctttctccttggacttcagtccctgcagtattttgctgccagatagcatgtggtgcctctacctgtaaatgtcagatctttgaaataaactattacagctcgtgccg

SEQ ID NO: 813 - DNA, 602 bp, Homo sapiens
gagggcagacatttggaaaacaggcaagactttggagaaagcagaccaggtatgatggccaccttgccaccaacagcccacacttcccagcaacctgtaaacatagaggacgaagatgggatcctggatgagtatgaccagtacagcctggcccaatcttatgtcgtcggtggaggtcggaaaggacgtaccaagagagaagctgctgccaacaccaaccgccccagccctggtgggcatgagaggaagctgctgaccaagttccagaactctgaaaggaaaaaggcctggcgctgagacagagctggagatgaggccagaccacggacaccacacccagcaatggatacaggaccttggagaaattaggagttgtaagcaggacctaggcctgcttgattctttcccacctaagtgaggctctggagagggaacaccaaaaaaagcccttccggacccagctaaagggcaagttaggagcgagaagcagagggtagatgggcagagctaagaaggcacccccaaaaagaacagtgggaaaaactggatgcccttgggtggcagtaacaataaactgtacaacagtgacagcaaaaaaaaaa

SEQ ID NO: 814 - DNA, 4862 bp, Homo sapiens
gccgaggctcgcccctccttgcaaggctgctccagagctagcgggcacgcgagctcctctccgggagcttccttccccgaaaggccgggacccagtggcggactcgtggtgagcgaggcagcaccttcgatcccaggagattgacctgttcttaaaagtgaaagaagaaatctaagaaaaacgctatggcaaagagaataaaagctaagcccacttcagacaaacccggaagtccatatcgctctgtcacgcacttcgactcactagctgtcatagacatccctggagcagatactctggataaattatttgaccatgctgtagccaagtttgggaagaaggacagcctggggacccgggagatcctgagcgaagaaaatgaaatgcagccaaatggaaaggtttttaagaagttaattcttgggaattataaatggataaactatcttgaagtgaactgccgagtgaataactttggaagtggcctcactgcactgggactgaaaccaaagaacaccattgccattttctgtgagaccagggcggagtggatgattgcagcgcagacctgctttaagtacaactttccgcttgtgactttatatgctacccttggcaaagaagctgtcgttcatggattaaatgagtctgaggcttcctatctgattactagtgttgaacttctggaaagcaaactgaaggcggcattattagatatcaattgtgttaaacatatcatttatgtggataacaagactatcaatagagcggagtaccccgaggggcttgagattcacagcatgcagtcagtagaggagctgggatccaagccagaaaactcaagcattcctccaagtagaccaactccttcggacatggccattgtcatgtacaccagtggctctactggccgccccaagggagtgatgatgcaccatagcaatctgatagctgggatgacaggccagtgtgagcgcatacctggattaggaccaaaggacacatatattggctacttacctttggctcatgtgctggaactgacagcagagatctcctgctttacctacggctgtaggattggatattcgtcaccactcacactgtctgaccagtccagcaaaatcaagaagggaagcaagggtgattgtactgtactgaaacctacacttatggcggccgttccggaaatcatggatagaatttacaagaatgttatgagcaaggttcaagagatgaattatattcagaagactctatttaaaattgggtatgattataaattagagcaaatcaagaaaggatatgatgcccctctttgtaatctgatactgtttaagaaggtgaaggctcttctaggaggaaatgtccgcatgatgctgtccggcggtgccccactgtccccccagacacaccgattcatgaatgtctgcttctgctgccccattggtcagggctatgggctgacagaatcatgcggtgctggaacagttactgaagttaccgactacactactggaagagttggcgctcctcttatttgctgtgaaattaaactgaaggactggcaggaaggtggttatacagttcatgataagccaaaccccagaggtgaaattgtgattggaggccagaatatctccatgggatattttaaaaatgaagagaaaacagcagaagattattctgtggatgaaaatggacaaaggtggttttgcactggtgatattggagaattccaccctgatggatgcttacagattatcgatcgtaagaaagatctggtgaagctgcaagccggagagtacgtgtctcttgggaaagtcgaagccgcactgaagaattgtccactgatcgacaacatctgtgcttttgccaaaagtgaccagtcttatgtgatcagttttgtggttcccaaccagaaaaagttgactcttttggcacaacagaagggggtagaaggatcttgggttgatatttgcaataatcctgccatggaagctgaaatactgaaagaaattcgagaagctgcaaatgccatgaaattggaacgatttgaaattccaatcaaagttcgattgagcccagagccatggacccctgaaactggtttggtaacagatgccttcaagctgaaaaggaaggaactgaagaaccattatcttaaagacattgagcggatgtatgggggcaaataaaaggcaactgtctacttcacatttgcacaggaggtggcctgatggtttttttagttctagagtttaagcctttgttgatctctctgttaaaatgtaaggtgaatcttctaaagacatgaaacaaaaaaacaaccaaaagtggttacaataaattgcatagtcctagagaagctgaaattgaagacatttccctttagctgtgttattaagtttagagcaaaaattctgttttagaatattagccttagctacacttgtttttctaaagatactccatgctaaagtaaacaaattggacttggactaggtgtagttgaagaaatctacagcttccagtgtctatgtcttcctagttcagaagtttctatcgtaatcattaggacaaaattacgtattaacactactcaaagccgaagttccaccaggctttgaaatcctcttccaaccatttctcttgaagggaaaaaaatcagttgtaataaatggattcagtatcttagaaggtattattttaagctcataattgccatgtaggtgagacatagaatcattataatattgtgaataattacagtgcctgaagttaaaactaaaacaacacacacataccaaaaatatctcataatgtatttgaagggaggctgaattgctcctttggatgtctaagaacttaaatcagcaactgtaattattgaaatgtcttcagaaaaatgtccactttgtaaaagtgacctttctgtgtgtgatctagtcaaaggctgagaccaaggggaacatgttagaaagtcaatcagaattcaataagatacattgcttttctgttagaaagttcatggcatcctaagcattcagaattaggatcctggcatagcactgagcctgggaaagagatttagcctctttaactttgataccagggcttgattttaaaatgtgcttgtattaaattacatttgtaatttatggtctgtttgctgttgctgattgattcttgatcagtagtgtgcatttcagagagcctttcattttgctttaatttcagcaaagcgggttatgataaatgacttcctcgaatcttgttcaaacctacgggtgattaagtgtcttggatgagtctgaggaagttaaagggaagaaaacactgttaacacttttcctgtttgtgaagagtttagaaactggaaatgctagatttgggagaagggcagagttacttgattaaggactgtctgtgcagtaacttgggagtgtgagtttctttttaaatcttcagctaaaatctggaattatatattcttgatagatattcgcacttgaaccatagttactgtatgtaaaaagcaaaaattcttaatactgttattctttgcacttttttcatagtcattttatacacacacacacacacatgcatgtgtatgtgtgtgtgtatatataatatatatatgttgcttacattgtgttgtacagatgtgggccaccactacaacaaaatgagttctttgtgctctaaaatatttataaagaaattatttaaatgttatgtatatggtggtaatattgagaaaaaaaatcatctggtattctgagcaacagcgaaggtttttgtaaaagtttcttttcagtgttgtgcaaactaaaatttgaggcaagttttccctgaagttctatgtgagtattctcatgcttcccatcttgcctttgaagtgtgaaaagacatcaagtagactactagtcagcttctacctactcctagtgcactgtttatccgtttttttttaaaggcttttccaatatatgtatcccatttggaatggtgattttaaaatgtgagtgcatgcagactatcttacttaagatacttgcaccccacccacagccatctcccaaagctggaacactgccaactaggtccttaagaatcacgcattgaatacaaggtcgggtgctgctaattcttcatgaaaatcctaacacacacgttaagggaccagggagatgccactgccctctgacttttcatcaaaaaaaaaatatatatatacatgtttatgtaaacagaactattttccatattcatagtgactttttaagtatttgagcctaaaggttttgatctccattttatacctatttaaatcgttcacaatttcatgtcagccatcaattaaagctgtgcttactgttgattgtgtgtgcatttctaaggtgaacgctcctaattttttgctttaattacatgaaagggtcttatttctttgatatttgtgctcttttttttaatgtagactgaaggtatgattgtgtgacttttaagaaatgaaataccgatgaatgatccatagagtccaaagtgagggagaatgctgtttctttgttcatagagactgactagtaatctttgcctatattttcctggtagcagatgacaaatgtttctacagtgacaagctgagaagaggttaaaggttaaagattgtgtggcattcgggaactggagagatacgttttaattttgaatgtagttacaaattttatattcatatttgtactttctgttaatgcacgattgtagaattgttctgtagattttttgtgtttactcttgaaaggctttgtttgttcttctttttaagtttgcacttgaatcttataaaataaatc

SEQ ID NO: 815 - DNA, 4862 bp, Homo sapiens; identical to SEQ ID NO: 814

SEQ ID NO: 816 - DNA, 1996 bp, Homo sapiens
ttgttggcagctgcctggcggtcctgaggagcggctagggcagcggagggaaagaaaagggaacggctcggaatttgctccagcggctgctgcaagacctcggcgccaacctcgcaccagcgagcgccccacagcccttcggctgcccctctatgtgctgctgagccggtcctggacccgacgagcccgccttcggtgttccgagccgaaatcgcaaagacggaaggactggaaatggcagaccatatgatggccatgaaccacggtcgcttccccgacggcaccaacgggctgcaccaccaccctgcccaccgcatgggcatggggcagttcccgagcccgcatcaccaccagcagcagcagccccagcacgccttcaacgccctcatgggcgagcacatacactacggcgcgggcaacatgaatgccacgagcggcatcaggcacgccatggggccggggactgtgaacggggggcaccccccgagcgctctggccccggccgccaggtttaacaactcccagttcatgggtccccctgtggccagccagggaggctccctgccggccagcatgcagctgcagaagctcaacaaccagtatttcaaccatcacccctacccccacaaccactacatgccggatttgcaccccgctgcaggccaccagatgaacgggacaaaccagcacttccgagattgcaaccccaagcacagtggaggcagcagcacccctggcggcgcgggtggcagcggcacccccggcggctccggcggcacctcgggcggcgcgggtggcagcagcgcgggcggcagtggcggtggcagcaccatgcccgcctcggtggctcacgtccccgcggcaatgctgccgcccaatgtcatagacactgatttcatcgacgaggaagtgcttatgtccttagtgatagagatgggtttggaccgcatcaaggagctgccagaactctggctgggccaaaatgagtttgattttatgacggacttcgtgtgcaaacagcagcccagcagagtcagctgttgactcggttaacctcgcggctgaaagaaatcaccctccctgcccccacccccaacttcttcggtgtgaattaaaaaaaatcaaaaacaaacaaaaaaaaaacaaaaaaacaaaaacattcccttagacgcagtatctcacttttcagatcctgaaaggtttgagaacctggaaacaaagtaaactataaacttgtacaaattggtttaaaaaaaaaaaaagattgctgccactttttcctgttcttgtttcgtttttgtagacttgacatccacctcccttatgtagttgaaagtatctagctaacttggtcttttttgttgtttgtttttactccttgtttcctcactttctcccgtgctcaactgttagatattaagcttggcaaactgcttaatcttgtggattttgtagatggtttcaaatgactgcgcactgcattcagatttatgagtgaaaggaaaaattgcatttcttggctgcatgaactttgaagggcagatattactgcacaaactgccgtctcgcttcattttttttttaaactatgcattcgagtacagacttaagttttcaaatatgctaaactggaagattaaaacagatgtgggccaaaccgttctggatcaggaaaagtcataccgttcactttcaagttggctgtctccccctcccccatatgtacagacaataaatagggtgtggaatgtcgtcagtggcaaacatttcacagatttttattttgtttctgtcttcaacatttttgacactgtgctaatagttatattcagtacatgaaaagatactactgtgttgaaagctttttaggaaattttgacagtatttttgtacaaaacatttttttgaaaaaatacttgttaatttattctattttaatttgccaatgtcaataaaaagttaagaaataaaaaaaaaaaaaaaaaaaaaaaaaaaa

SEQ ID NO: 817 - DNA, 1996 bp, Homo sapiens; identical to SEQ ID NO: 816

SEQ ID NO: 818 - DNA, 2680 bp, Homo sapiens
gcagctgtgagggcttcccggaagatggtgctgattaaggaattccgtgtagttttgccgtgttctgttcaagagtatcaggttggacagctttactctgttgcagaagcgagtaagaatgaaactggtggtggagaaggaatcgaagtcttgaagaatgaaccttatgaaaatgatggcgagaagggacagtacacacacaaaatctaccacctgaagagcaaagtccctgcgttcgtgaggatgattgctcccgagggctccttggtgttccatgagaaagcctggaatgcttacccctactgcagaacaattgtaacgaatgagtacatgaaagatgacttcttcatcaaaatcgaaacatggcacaaacctgacttgggaacattagaaaatgttcacggtttagatccaaacacgtggaaaaccgttgaaattgtccacatagacattgcagatcgaagtcaggttgaaccagcagactacaaagctgatgaggaccctgcgttattccagtcagtcaagaccaagagaggccccctgggacctaactggaagaaggagctggcaaacacccctgactgtcctaagatgtgtgcctataagctggtgaccatcaagttcaagtggtgggggctgcagagcaaagtagagaacttcatccagaagcaagaaaaacggatatttacaaacttacatcgccagctcttttgttggattgacaagtggattgacctgacaatggaagacattaggagaatggaggacgagactcagaaagaactagaaacaatgcgtaagaagggttccgtccgaggcacgtcggctgctgatgcctagatgagcccctgtaggtcagagacattatcaaactgtctacggagtcaaggccaagtgagggggaccagtgcggcctgcgacgactaaagccaccagcgtctcagtgttgacggatgtttccagtgtgtgcctctgacggctcgggcacacttgtgcacactcgagggcacacacacacccatgcacacacactcacactgtatgtatgtctgtagctgtatgtaaagcacatatggctacaggcctagatacacacgagtgtatatatatatgtacatgtgaagatggatcagtaccttttctccaaagtactgcacctgtcttcagcagaaatactaaagaaaatattttcaatatatatacctggaacagatattaatacccatcaacatgatgccctggatggacaaacggactgccatgtggtgccctgtggtgctggctggcgtgcttcgtgaatgccaggtgtggaccagtgtgtacagcctttggttaggtttctgtttttttcaagtcaccacacacacacacacgtttagtctcaacccatcagcaacaactcctacagaaagattttttcaaatttttagatactccagtgactctggaatgtaaactctggatgtatttataactatttatttctgggtggccactatcttccagccaaatccaacaatatctgtcaagtaaggagtgaaagctctttattggtttgcccgagggttggggatatccttttttttaaaaaattgccactttttattggatttttgtattttgaatttcaagtatttttctatatcaaatctagcaaaaaacggtgatgacggtttgtgatttataataaacactgacaatattcagattctggctaagcaaacagggtgatcaggcaattaacctgagtggcactggaggctgtgcagagccattctgtggagttttgtttctgaaatggcttttctggaattacggcctggagactggatggtctgtattgctctcagttcacagggtaggagagtggtcccgcccggctgtttccagttacagtccaagctaggaggaaatgctgatgggagcaggcacagcttgagcatgacacaggcctgtccccgtcctgaggcccagctagacctgggccttgccgacagctctgcttcctcctcctgtatctcctcctcctcccccttcctcttctgtctctactttctcctttttttttaagagaaaggagcagtagctgggaaggattttcttttttttacctttccgtctgatgctattctcctctcgtcagtcctggaaccctgaccagcatcacactgttgaatccttcaggttacacactgccttttaacctccaccctgcagtcagagcacggtggtgacacccctttgttgacaggcttgaccttcatgtcccttctgccctgccctgtgtcccatgggggaaatggcagagagtcccactgcatcacactgccctgttagcctcagcaacaagccctgggttccatgtcctctaagctctagataaaggtggttattccctgggcactgctggaagctgggaaggtcaccaccagaagggtcattgccagccttgtctcctccagtgaaaccagatcacagacatccatagtttctctgagagctggggcacacaaggaaaccagagcccagtatggattcttgtgttgctctagcagctgtggagattgagggatgtggtgaatgcaaagaacccagtttacttggcagtctcctgtgtaaatcacagtaaaacaaagtgaaatcgaaacaagaataaatttgatctcaaaatgaaaaaaaa

SEQ ID NO: 819 - DNA, 1684 bp, Homo sapiens
gctcctactgggcctgactttgctggtgagctccctgcaagctttggtgtgctttgagtgtggcaacctcaattctatggggatttgtaactttagaacagctgtatgttacgctcatcctggtgaggtttgtgcctcagttttaacctataaagatggaaaatttgtatatggaaaccagagctgtgctgagtgctccgggaggactgttgagcatggaagtctgatagtatcaacaaactgttgctcagccacctctttctgcaatatagtacgtccctgatacttaattgtatggaaggattttagtgctctttactgagtcttgacactggagcatgccagaaagaattatctactgaccgtgtctggagaacgcactaagatttctacatcatgttttctgactacgtgtacatcatatcatatgatcttcagtgatctgtaataaattgaaggccttacaaattttgcggctgccactgcaaccatggtctccggcagcagcggccttgccgccgcccgcctgctgtcgcgcaccttcctcctgcaacagaatggaatacggcacgggtcttacacagcctctcggaaaaatatctatattgataaaaatacgaaggttatttgccagggtttcacaggcaagcagggtacctttcacagccagcaggctttggagtacggcaccaaactcgtgggaggaaccactccagggaaagggggcaagaagcacctgggcttacctgtctttaatactgtgaaggaagccaaagagaaaacaggagcgacagcttctgtcatttatgtccctcctcctttcgctgctgccgccatcaatgaagcaattgacgcagagattcccttggttgtgtgcattactgaaggtattccgcagcaggacatgttgcgggtcaagcacaagctgacacgccaggggaagacgaggctaattgggccaaactgccccggtatcatcaaccctggagaatgcaaaatcggcatcatgcctggccacattcacaagaaaggaagaataggtatcgtgtccaggtccggtactctgacttatgaagcagttcaccaaacaacccaagttggattggggcagtccttgtgtattggcattggaggtgacccttttaatgggactaattttattgattgccttgacgtcttcctgaaggatccagctacagaaggcatcgtactgattggtgaaattggtggtcacgctgaagaaaatgccgcggagtttctgaaggagcataactcaggtccaaaggccaagcctgtagtgtccttcattgctggtataactgctcctcctggcagaaggatgggccacgcaggggcgattattgctggaggaaaaggtggcgccaaagagaagatctctgctcttcagagtgcgggtgtaattgtcagcatgtcccccgcacagctgggaacctgcatgtataaggaatttgaaaagaggaagatgctttgaaggacacgacatgaattttaaggctgtggaggaaatctcacagactggagagcccgtccagactgcagcccaggcacctgaccctggtctctcagtacaggggaagtccaggcatgttttagaatgtcctaaattgagctattttcacttactgtgtaacagagacagataataaatctatcatttgatttg

SEQ ID NO: 820 - DNA, 2843 bp, Homo sapiens
tagcggaagccgcggggtgcgcttgccggggcctgccccgtggacccgctggacccgagcctgcagagtgccgaggtggcgccggagggaactaacccggcggaggccacgagtcagtcggtgactcacgagcatcgtgccaggctctgacaccatcgctgcagttgtgggcctcgcgctgtgtgcccgggttctgcaccgcagggcgcctctgctgtcccggtgcgttgctccggcgtgggatcccggagctgtcaggctcagcgcgagggtgaatggggaccggggcgtgcaaaggaactctattttaaaaaactctcaagtaaaaaaaagcaagtcatggagaagaacgggaataaccggaagcttcgggtttgcgttgccacctgcaaccgagccgattactccaaactggcccccatcatgttcggcattaagacggagcctgcgttcttcgagctcgacgtggtggtgctgggctctcacctgatcgacgactacggaaacacataccgcatgattgagcaggacgactttgacatcaacaccaggctacacacgattgttagaggggaagacgaagcagccatggtagagtcagtgggcctagcgctagtgaagctaccggatgtcctcaaccgcctgaagcctgacatcatgattgttcacggagaccgatttgacgccctcgctctggctacatctgctgccctgatgaacatccgcatccttcacattgaaggaggagaggtcagcgggactattgatgactctatcagacacgccataacaaaactggctcactaccacgtgtgctgcaccaggagtgcagagcaacacctgatctccatgtgtgaggaccacgaccgcatccttttggctggctgcccttcctatgacaaactgctctcagccaagaataaagactatatgagcatcattcggatgtggctaggtgatgatgtaaaatgtaaagattacattgttgccctgcaacacccggtgaccaccgacattaagcattccataaagatgttcgaactgacactggatgctcttatctcatttaacaagaggaccctagttctgtttccaaatatcgatgcaggcagcaaggagatggttcgagtgatgcggaagaagggcatcgagcatcaccccaatttccgcgcagtcaagcacgtcccgtttgaccagttcattcagctggtcgcccacgctggctgcatgattgggaatagcagctgtggagtgcgtgaggttggcgcctttggaacccctgtgatcaacctgggcacgcggcagataggaagagaaacgggggagaatgttcttcatgtccgggatgctgacacccaagacaaaatattacaagcactacacctccagttcggtaaacagtacccttgctcaaagatatatggggatggaaatgctgttccaaggattttaaagtttctcaaatccatcgaccttcaagagccactacagaagaaattctgcttccctcccgtgaaggagaacatctctcaggatattgaccatatcctcgaaactctgagtgccttggctgttgatctcggggggacgaatctgagagtggcgatagttagcatgaagggtgaaatagttaagaagtacacccagttcaatcctaaaacctatgaggaaaggattagtctaatcctgcagatgtgtgtggaagcggcagcagaagccgtgaagctcaattgcagaattctgggagtaggcatctccacaggtggccgtgtgaatccccaggaaggagttgtgctgcactcgaccaagctgatacaggagtggaactctgtggacctcaggacaccactctccgacaccctgcatctccccgtgtgggtggacaacgacggcaactgcgctgccatggcggagaggaagtttggccaaggaaaaggacaggagaactttgtgacgctcatcacagggacagggatcggtgggggaatcatccaccagcacgagctgatccacggcagctccttctgtgcggcagagcttggccacctcgtggtgtctctggatggtcctgactgctcctgtggaagccatgggtgcattgaagcctacgcctctggaatggccttgcagagggaagcaaagaagctccacgacgaggacctgctcttggtggaagggatgtcagtgccaaaagacgaagctgtgggcgccctccatctcatccaagccgccaagctgggcaacgtgaaggcccagagcatcttacggacagctggaactgctttgggactcggagttgtgaatatcctccacactatgaatccttccctggtgatcctgtctggagtcctggctagtcactacatccacattgtgagggacgtcatccgccagcaagccctgtcctccgtgcaggatgtggatgtagtggtttcagacttggttgacccggccctgcttggtgcggccagcatggttctggactacacgacccgcaggatccactaggcctcctgggaatagacctggactgagacccaagagctactgagtggaaccacgctctcttagatcagtatttcttcaaaggccagtgtgggaggctgcggagccagctcagtggtcaagagcctaaactgctcttgccaaagacccaagttcagttcccagcacccatgtcaggcactcaactgcctgaaagccaagctccaggggatccagtgcctcagctgcctcaggcatctgcactcaaatgtacatagtcctctccagaatacacgtaaattaaaataaatcttattttttaaaaggcaaaaaaaaaaaaaaaaaaaaaaaaaaaaaaa

SEQ ID NO: 821 - DNA, 1609 bp, Homo sapiens
ccgcggcccgccgcggcccgccacgtcccgcacgtagagcccgggcagcggcatagagcggcaggttggcgccgggagctccggctcctccggcggggctcggtatgaggctggcaaggctgctgcggggcggcacgagcgtcaggccgctctgtgccgtcccctgcgccagccgtagtctggcctcggactcggcctcgggctccgggccggcgtcggagagcggcgttccgggccaggtggacttctatgcgcgcttctcgccgtcgccactctccatgaagcagttcctggacttcgggtcagtaaatgcttgtgaaaagacctcgttcatgtttcttcgacaagagttgcctgttagattggcaaatataatgaaagaaataagtctccttcccgataatcttctcaggaccccatccgtacagctggtacaaagttggtatatccaaagccttcaggagctgcttgactttaaggacaagagtgctgaggatgctaaaactatttatgaattcacagacacagtgataaggatcagaaaccggcacaatgatgtcatccccaccatggcccagggtgtgactgaatacaaggagagcttcggggtggatcctgtcaccagccaaaatgttcagtactttttggatcggttctacatgagtcgcatctcaattagaatgctactcaaccagcactctttattgtttggtggaaaaggaagtccatctcatcgaaaacacattggaagcataaatccaaactgtgatgtagtcgaggttattaaagatggctatgagaatgcgagacggctttgtgatttgtattacattaactctcctgaactagaacttgaagaactaaatgcgaaatcaccaggacagccaatacaagtggtttatgttccgtcccatctctatcacatggtgtttgaactgttcaagaacgcaatgagggccaccatggagcaccatgcagacaaaggcgtttatcccccgattcaagttcacgtcacactgggggaggaggatttgactgtgaagatgagtgaccggggaggtggtgttccgctgaggaagatcgacagactcttcaactacatgtactcaactgcaccccggcctcgtgttgagacgtcccgtgcggtgcccctggctggatttggttacggattgcccatatcacgcctctatgcacagtacttccagggagacctaaagctgtattccttagagggctacgggacggatgctgtcatctatattaaggctctgtcaacggagtccatcgaaagactccctgtgtataataaagctgcctggaagcattacagaaccaaccacgaggctgacgactggtgtgtgcccagcagagagccgaaagacatgacgacgttccgaagctcgtaactgcacatgggacgcctggcaaagccaaatgtggtttttgccaaacttggaagagagatgtatttggaaccacattgtaccaaatatgtcatgtgtgatttttcacaatcagtgtttgctaaagctcctaaaggatcaattatagcaactttattctgatatgttttgttaaaaaaaaaaaaaaaaaaaaaaaaaaaaaa

SEQ ID NO: 822 - DNA, 1424 bp, Homo sapiens
cgcagcccagacaatgcttatccggaccggactccagcccacttctgccacctgaagggctccggttcgtgtgcaccgggaggcaccagagtctaagggcatccgggaagggactgttcggccggtccccgggcagccgctgggcgagaggaggaggctgcgccaaacagacagcaagcaagccttcgccagcagttcatctcctagacctcatcagactctgacccagttcttgaatgactttggagacccagatgtttcagaatgcacattctggaagccaatggctactcccaccactgacaatgttgctgctgtttgcttttgcagacaggcagacgggagatcttctgaaggctgtggtgaaacgtgatcccccatggatccaggtgctcaaggacgacactgtgacgctgacgtgcgaagggacccacaatcctggaaactcttctacccagtggttccacaaccagagctccacctggggccaggtccaagccagctacacgtttaaggccacagtcaatgacagtggagaataccggtgccgaatggcgcacaccagcctcagcgaccccgtacatctggaagtgatttctgactggctgctgctccagacccctcaactggtgtttctggaaggagaaagaatcacattgaggtgtcacggctggaagagcatacagctggccaggatttcattcctccagaatggagaatttgtgtcatttcatccttataatgttagctactccatctcaaacgccaaccacagtcacagtggggactactactgcaaagcatatctaggaaggacagaacacgtgtccaagcctgtcaccatcactgtccaaggttcagcaacggcgtccaccagctctctagtgtggttccatgccgctttctgcctagtgatgtgcctcctgtttgcagtggacaccggcctgtatttctgtgtacggagaaatcttcaaacctcgggggaggactggaggagatccctgtcagtcggaaagtacaaggctccacaggacaaatgacatcccatcgtatggctaaacagcggcagcttcttttcagccacaccgccacttcatctacagccttcctttgaaagcaacttaccaccaggctggatatttggtcctgcaatcaccaactgctaggaggctgaggcaggaggatcaccaaaggctgcccgggttttagagaagagagagtgcaagtctatcctggataacccaataagaccctgggtttagatggcttatcaggaaagagcacccattgctaagctcaccagacaagaccacagattgatccctaaggacacagggcaaagggagagaacaaattcctgaaagttgtcctctgacctccacaggtccaccatggcagatgcacacaataaacaaattaaaatg

SEQ ID NO: 823 - DNA, 1424 bp, Homo sapiens; identical to SEQ ID NO: 822

SEQ ID NO: 824 - DNA, 843 bp, Homo sapiens
gggccgaggtgccgcggggttgctggagggtcgtgggcggcgtgcaggagacatgtcggcgggcagcagttgcagccagactcccagccgggctatccccactcgccgcgtagccctcggcgacggcgtgcagctcccgcccggggactacagcaccacccccggcggcacgctcttcagcaccaccccgggaggaaccagaatcatctatgaccggaaattcctgatggagtgtcggaactcgcctgtggccaaaacacccccaaaggacctgccaaccattccaggggtcactagccctaccagcgatgagcctcccatgcaggccagccagagccatctgcacagcagcccggaagataagcgggcaggtggtgaagagtcacagtttgagatggacatttaagggaccagccataggacgcagtgatgcttctgggcccctggggcccttgggaggagagccacagcagtcaggccttgtacccggcagacactgggtgtggatcggccacccagtcctgctcctcactcagggcacctgctctgccttccattttgtgaataccagcacatacctccttgtgcctctgttgatactgagctgctactccagggtaatgactctcacctacaccctccctgcatcaagcgccagcgagtggacacagaggagtctgtcggaatgatctggcaattctagccccaacctctggagcacacccaccttaccttaggttggggtacctgggaaagccaccctttacttctttccctgagaggaaataaaagccacatttaccctaggcccacagccgggccctgtctgaaaaaaaaaaaaaa

SEQ ID NO: 825 - DNA, 843 bp, Homo sapiens; identical to SEQ ID NO: 824

SEQ ID NO: 826 - DNA, 2525 bp, Homo sapiens
cacacgtcggagcgcagcacctactaccacctggctggggacaagttattactttgagtaatccttaaatgaagagtgggtaaagcccatatacggaagagagactccagtcaacaatatcaataagttgaagaagaaaaatgttgtccttaagcaatctacaaaatatcatctataacccgacaatcccctatgtcagtaccattactgagcagttgaagcctggctctttgatcgtgatccgtggccatgttcctaaagattcagaaagattccaagtagactttcagcatggcaacagcctgaagccgagagctgatgtggccttccactttaaccctcgcttcaaaaggtccaactgcattgtttgtaacacactgacaaatgagaaatggggctgggaggagatcacccacgacatgcctttcagaaaagaaaagtcctttgagattgtgatcatggtgctaaagaacaaattccaggtggctgtgaatggaaagcacattctgctgtatgcccacaggatcaacccagagaagatagacacactgggcatctacggcaaagtgaacattcactccatcgggttcagattcagctcggatttacagagtatggaaacatctactctgggactgacacagataagtaaagaaaatatacaaaagtctggcaagctccatttgagcctgccatttgaagcaaggttgaatgcctccatgggccctggacgaaccgttgtcgttaaaggagaagtgaatacaaatgccaaaagctttaatgttgacctagtggcaggaaggtcaagggatatcgctctgcacttgaacccacgcctgaatgtgaaagcgtttgtaagaaactcctttcttcaggatgcctggggagaagaggagagaaacattacctgcttcccatttagttctgggatgtactttgagatgataatttactgtgatgtccgagagttcaaggttgcagtaaatggtgtgcacagcctggagtacaagcacagatttaaagacctaagcagcatcgacacactagcagttgatggcgatatccgtttgctggatgtaaggagctggtagctatcatgactgccagaaccctggaaatacaaaatggcttatccgatactggccatgtcaaatgcatctcgctttcaccacattgttatactgttaagttgagctcgcacaacatcaagtcctactggtgttgtcaggcctggccatgcagtgtggctacctctgaattcccaggaacagatggggcagtcacagctcactgcgagcgaggctctgcacaccgggtccctcttataaaactgcactcaacaaatatctaagtgcctaatatactacatatgctagctgacagggatggcaagcgtacttcctctgtacattctctgagctggccagacatggcagtgcccacaacttgtgtggtgcctgttttctggcactcacatgtcatgcgaccagtttctgatgtagggtcttcctgctagcattgcatttaccccactaggggcctttgcagttaagatcagaaaaatatactaatggatggaaaacactacttccccagtaatcctgtcataatcaacattctatcatatctcataactgaagactgcataacatttatttagctctcactgctttaaactttataaaatatatgatgctgaacacagcaaaaaaactgaggccaaaacgctgaattatgacaaaacaagtgttctgctccaggcagatttctgctggttgattggcagattaagtccagggtgtttgtgggtgcctgtggcaaagcgcggtagaagtttatagtttgaaaaaccctcttgggtaactaacatcaaggtatacagtgagtatataaaacaggcactgtcagagcaaaaccgatccaggagggcagtgtgaaaaggttgagctggtgtggagaccagccctcgtgcctttgggtctgaagatgtcggcacatcatcagtgaggtcaagcactgctctgcctgctaagtcgacttgtatcagcagatacagcttctgtactcctgtaacctccaggatttgactggagccctaggtagtctttcttcactggttgtcacagatgtcaaaggtttggctgttgggagggggaagtgttactttcatcaggtcattgtatgatattaaaccacaggatagcattttgccagggtttaggagtattcagtcaacttgcccagatacacgtatcatacataggaaataacagcatcagcaatcttactttttaggaagtactcaaggcagcaactgctagtccttcattttcatgcaaatttattatgtttactctaaaaaattcatatggggtggtggatggaactgggcaattcgtagggagcccaggaggctctagaatcccccagttacttccttcatgcattactgagatgttgggggttgaaaggccctcagttaaaaataaaagcccattcatacaaaaaaaaaaaaaaaaaaaaaa

SEQ ID NO: 827 - DNA, 2452 bp, Homo sapiens
tgagctgctcgctaccgggccacgaactggacgtgaggggcctggtgtgctgcctctacccaccgggagcctttgtgtctgtgtcccgggatcgtaccacccgcctctgggctccagacagtcctaacaggggctttacagaaatgcactgtatgagcggccactctaattttgtgtcttgtgtgtgcatcataccctcaagtgacatatatcctcatggactaattgccactggaggaaatgaccacaatatttgcattttctcgctggacagtccgatgccactttatattttaaagggtcacaaagatactgtttgtagtctttcttctggaaaatttgggacattacttagtggctcatgggacaccactgctaaagtctggctgaatgacaaatgcatgatgacattacagggtcacacagctgcagtatgggcagtaaagattttacctgaacagggcttaatgttaactggatcagcagacaaaacaattaaactatggaaggccggaagatgtgagaggactttttcagggcatgaagactgtgtaagaggtttggcaattttgagtgaaacagaatttctttcctgtgcaaatgatgctagtattagaaggtggcagataactggcgagtgtcttggagtatactacggacatacaaattatatttatagcatatctgtctttccaaattgtagagattttgtgacaactgcagaagacagatctctaagaatatggaaacatggtgaatgtgcccaaacaatccgacttccagctcagtctatatggtgctgctgcgtactggacaatggtgacattgtggttggtgcgagtgatggtattattagagtgtttacagaggcagacgagcggacagccagtgccgaggaaatcaaggcttttgagagagagctctctcaggcaactatagactccaaaactggcgacttgggggacattaatgctgagcagcttcctgggagggaacatctgaatgagccaggtactagagaaggacagactcgtctaatcagagatggagagagagttgaagcctatcaatggagtgttagtgatggcaggtggataaaaattggtgatgttgttggctcatctggtgctaatcagcaaacatctggaaaagttttatatgaagggaaagaatttgattatgttttctccatcgatgtgaatgaaggcggaccatcatataaattaccatataatgtcagtgacgacccctggctggttgcatacaacttcttgcagaaaaatgatttgaatcccatgtttctggatcaggtggctaaatttattattgataacacaaaaggtcaaacactgggacttggaaataccagtttttcagacccatttacaggtggtggtcgctatgttccaggaacttcagggccttccaacacagtgcagacagcagatcctttcacaggtgctggtcgttatatgccagggtctgcagggatggataccaccatggctggagttgatccatttacaggaaatagtgcctaccgatcagctgcgtttaaaacagtgaatatttatttccccaaaaaagaagctcttaccttcgaccaagcaaaccctacacaaatattaggaaaactgaaggaacttaatggaagtgcacctgaagagaagaagctaactgaagatgacttggtacttctggaaaagatactgtccctgatttgtggtaatgcttcagaaaagccgacggcccagcagcttcaggttctgtggaaagccatcaactggcctgaagacattgtctttcccgcacttgacattcttcggctatcaattaagcatcccagtgtgaatgagaatttctgcaatgaaaaagaaggagaccagttcagcagccaccttatcaaccttctgaaccctaaaggaaagccagcaaaccagctgcttgctcttaggactttttgcaattgctttgttagtcaggcaggacaaaagctcatgatgtcccagagggagtcattgatgtcacatgcaatagaactgaaatccgggagcaataagaacatcatattgctctggctacactgaccttgaactattctgtttgtttccataaagaccataacattgaagggaaagcccaatgcttgtcagtgattagcacaatcttggaagttgtacaagacctagaagccacatttagactccttgtggctcttgggacacttatcagtgatgattcaaatgctatacaattagccaaatctttaggtgttgattctcaaataaaaaagtatgcttctgtatcagagccagctaaagtaagtgaatgctgtagacttgtcttaaatttgctgtagcagtggggaaaggaagctgaggggttttcttttttttgttttgttttgttttgtttttttccacattttacatgactgattggagatgattta

SEQ ID NO: 828 - DNA, 1765 bp, Homo sapiens
ttgaaaaggtactggaaactgaggaccctatctggatcaaagcagtttctgatggagccctcgcctcttgagctaccagttgatgcagtgcggcgcatcgcggctgaactcaattgtgacccaaccgatgagagggtggctctccgcttggatgaggaagataaactgaagcgttttaaggactgtttttatatccccaaaatgcgggacctgccttcaattgatctatctttagtgaatgaggatgataatgccatctatttcctgggaaattcccttggtcttcaaccgaagatggttaaaacatacctggaggaagagctagataagtgggccaaaataggagcctatggccatgaggtagggaaacgtccttggattataggagatgagagcattgtaacccttatgaaggacattgtaggagcccatgagaaagaaatagctctaatgaatgctttgactgttaatttacatctcctgctgttatcattctttaagcctacaccaaagcggcacaaaattcttctagaagccaaagccttcccttctgatcattatgcgatcgagtcacagattcaacttcatggacttgatgttgagaaaagtatgcggatgataaagccacgagagggggaagagaccttaagaatggaggacatactggaagtaattgagaaggaaggagactcaattgctgtggtcctgttcagtggcctgcacttttatactggacagctgttcaacattcctgccattacacaagccggacatgcaaagggctgttttgttggctttgacctagcgcatgcggttggaaatgttgaactccacttacatgactgggatgttgactttgcctgctggtgctcctacaagtatttaaattcaggagctggaggtctggctggtgccttcatccatgagaaacacgctcacacgatcaagccagcgttagtgggatggttcggccatgaactcagtacaagatttaacatggataacaaactacaattaatccccggggtcaatggattccgaatttccaaccctcccattctgttggtctgctccttgcatgccagtttagagatctttcagcaagcaactatgactgcgctgaggagaaaatccattctgctgacaggttatctggaatacttgctcaaacattaccatggcggaaatgacacagaaaacaagaggccagttgtgaacataatcaccccatccagagcagaggaacgaggctgccagctgacactgaccttttccatttccaagaaaggcgtttttaaggaactagaaaaaagaggagtcgtctgtgacaagcgagaaccagaaggcatccgggtggccccggttcctctctataattctttccatgatgtttataagttcatcagactgcttactgccatactcgactctacagaaagaaactagccatgctttctaaataactcaagtaaatctcacacactgggggttccacttctactgcattttagtcattcaaaagtctccagaaattgatggcatagaaatgatgatgattttataaacttacataaaacctggtacatgttttaatatctgtgtcgctgatgtgctgtggactaagaagtcacattttacatgactccaacctacagatgactgtcttgatcagctgtcaccttccatggtcactgaaaggttgtgtgtttaatttgtgactgaaatgacaacattaaaatgtatctggacttcttgtataaaaaaa

SEQ ID NO: 829 - DNA, 5990 bp, Homo sapiens
gaggaagcaaagaccgggcaaaacacatgaaggaaaatttggaacttcttttataatatcaacaagacatttggggccaaataaatcctctccgttacacaaaaccaaaaatggcatacaattggcaaacagagccaaaccgtgctgaaccacaggaaggtggacatgatcaccagcagtgtcaccatgcagaccagcacctttcttccaggcaagtcaggttgggttttgatcagcttgtggaagagctcagtaacaaaactccactgcctgaggatgaaaaagaaggcacgtgttttgtaccagatacaccaaacttggattcaaaatggcaatccatatatggaccccacccaaggcacttcaatgaattcacttctcagagtccccacttctcccagcttccttttggaaaagcatcagccattggttttaatcctgctgtattacctgcacatcagttcattcatgagggagcctcctggagaaatcccacaagaaaatatcatggtggtgaggatcccaggttcagtgctctaactccgtcatccactggcttggataaatgtcatcaacaaggacaatcagggaccgaacattgtaactattatgtggaacctgaaaacaatgttccccatcattattcaccctactcaatggactccatacccgatagtgaggaaaaaggaagtggagatgcggatcttgtagaaccttctctggtgttctctaaagactcctttctacccagggcatcggagaacatgtcagtggaaagcacagagcccattggttgcccccttgaaatagttgaagcaccccaagggagtaacaagagcctcgcctccttttgcaacaatgtaacaaaaataagaggactatatcatgcaagtgacactaattccaattccggaaagatctgggccatcaccacagcctatccatctcggctcttcgctgacacccagttcagagttaaaatttccactgataactcggcacaacttcttcttcttaagccacccgctaattatcttgtcaaagacctaattgccgaaattctacttttatgtgcaaatgagcagctttcccccaaagagtatcttctaagtatatgcggttctgaggaatttttacagacggatcactgtctagggagccacaaaatatttcagaaaagtaaatctgtcattcaactccatctccagagaagcagggacactccaggaaaattatcccggaagagggatgatgaccgcagtcgggtccatctgaaccaacttctagaatttacacatatttggaaaatatccagacaatgcctctccacagtaatgaaaagctacaacctccatgtcgagcacctgttgaaaacccaggaagatgtggaggagaaacctctgtcatccatgttttcctgtggccgacaccctcctcagccacatgggaatgacattattgaagatgttagaaacatatgcagtgttctggggtgtattgaaaccaaacaagtttcagatgcagtaaaagaactaactctaattctgcagagaccatcacagaattttcatcagaattcagagacttcaaaaaaaggcttcatagagaacgtgacatcggaactgtcgaggtccctccatcagctggttgacgtgtactgcagtagcttttgtacagatttccggcctgcgcgcgcacctggaggcgtctcccgcgaccacgctgggctccactcccacctgagcttcacggtgtgttccctgcacaatgttccagaaacttgggcacacagctacaaagcattttcattttcctgctggctcacatatgctgggaagaagctgtgccaagtgaaaagctgcagatccctgccagtcacaaagtcattctctttttcggtgaactggaatgaaataatcaattttcctcttgagataaagtcacttccaagagaatccatgctcgttataaagctgtttgggattgacagtgccacccacagcgcaaatctgctggcctggacctgccttccactatttccaaaagaaaagtctccgctggggtctaggcttctcagcatgacactacagagtgagcctcctatagaaatgatggctccaggagtatgggatgggagccagcctaccccactgaccctgcagatagattttccagctgccacgtgggagtacgtgaaacctgagactgaagagaacagaactgaccaccaagagcctccaagagagtgtttaaaacacatcgccagactctcccaaaagcagcctcccttgctactttctgtggaaaagaggagatatttgtggttttatcgtttctactgcaacaatgagaactcctctctccctctggtcttgggcagcgcccctggttgggatgaagggacagtttcggaaatgcatgccgtcttgagaaggtggacattttcccatccgttggaagctcttggccttttgacttccaggtttccagaccaagacattcgtgaagttgccgttcaacagttagacaacttcttgaccgatgagctgctggactgcctcccacagctagttcaggctgtcaagtttgagtggagtctcgaaagtcccttggtggaactcctgcttcatcgatccttgcaaagcatccgagtggctcaccgcctgttctggctgctgcgggatgcacaaggtgaagactactttaaaagctggtaccaggagcttttggccgctctccagttctgtgcaggagaagccctgatcgaagagctttccaaagagcagaaacttgtcaaactcctgggtgatattggagaaaaagtgaagtcggctggcgatgctcagagaaaggatgtgctaaagaaggagattggcagtctagaagaattctttaaagatataaagacttgccatcttcctctgaacccggccctgtgcgtaaaaggaattgatcgggatgcatgttcatatttcacatctaatgccttgccattgaagatcactttcatcaatgctaatccaatgggcaaaaatatcagtgttatttttaaggccggcgacgatcttcggcaggatatgcttgttctgcagattattcaagtgatggacaacgtttggcttcaggagggcctcgatatgcaaatgatcatttatggatgtctagccacaggaaaggctcaaggattcatagagatggtgcctgatgctgtaacgcttgccaagatccatctgcactctgggctgataggacccctgaaagaaaacaccatcaagaagtggttcagtcagcacaaccacttaaaggaagattatgaaaaggccttgaggaactttttttactcttgtgctggctggtgtgtggtgacattcatcttgggagtctgtgaccgacataatgacaatatcatgctgacaaagtcaggccacatgtttcatattgactttggaaaattcttgggtcacgcacaaacatttggcggtataaaaagggaccgagcgcctttcatttttacttcagagatggagtactttattacggagggtgggaaaaacacacagcattttcaagacttcgtggaactctgctgcagagcctacaacattgtgaggaagcacagccaactgctcctgagccttctagaaatgatgctgcatgccgggcttcctgagctgagggggattgaagacctgaaatacgtacacgacaatctccggccacaagacacagacctggaagccacaagtcattttaccacgaagataaagcagagtctggagtgcttcccagttaaactgaataacctgatccacacgcttgcacagatgccagccttcagccttgccagacctgcccctcagactcctccccaggagtgctgcgtcctgaataaaaccaggacaattcagagagtcacaattttagggttcagcaagacacacagcaacctgtacctgatcgaggtgacacgcagcgacaacaggaaaaacctggccaaaaagtccttcgagcagttttacagacttcacagccagattcagaagcagttccccttgttgactctcccagagtttcctcactggtggcatctacctttcacagactcgcaccatgagagaatccgagatctgagtcactacgtggaacaggtgctgcacggatcttacgaagtcgcaaacagtgattgtgtactcagtttttttctctctgaacatatacaacagacccttgaagactctccatttgtggacccaggtgaccattctccagacaagagcccccaggtgcagttgctgatgacctatgaggacacaaagctcaccatcctagtgaaacacttgaaaaacatccatctcccagatggctcagcgcccagcgcacatgttgaaatttatcttctgccacatcccagtgaagttcgcaggaagaaaacaaagtgcgttccaaaatgcactgacccaacttacaatgaaattgtggtatatgatgacgtctcaggacttcagggacatgttttaatgctcattgtgaagagcaaaactgtatttgtgggagcggttaacattcagctctgcagtgttcccctcaatgaagaaaagtggtacccattagggaacagtatcatctgaccaatgccatgaatgtatgcattattgattaagtacttgtgtgttttcagcttccatttcccctatagcatacacaaggcatctttcttgcggaagatggcttggagcagtggttctcactcagcgtccctaacactgcgaccctttaatacaattcctggtgattgtagtgacccaaaccacaaaattattttagttgctatttcacaactgtaattttgacacggttatgaattgcaatgtatatatctgatctacaggatacctactattcgacccctgtgataaaagggtcattggacaatcccaaagggtcatgactcatgggttgagaaccacaggcttagagtggtcacagaagaagcagatcaaaatcagtcttttgtagctctttcttctctaccttctccttattttcttatcatattttctccttggaatattcatcatggaaaatcccatatgcaaagtcatgaaagaatgattcatttaatatgcatttttgaatcaaactaagttcatgtcttgccttaattgcttgttgaggtcaaaattatacttttagggtgttttctaaagctaggagaagctcatgtaagggttaagaatatttgcaatatatttcaaaagttaaatatgtgtacaagccacatatctagtcatgattgaatttattgagagaattggtgatctccaaccatgtgctataatttttctatcaaaaaaaaatccctaagatttttctattgcatagattttttttctttaagaatttcatgcatgtatatagtgctttcgttattgtagcttctctcttttttagttgtccccacacccatcaacaactgttcttctctaaaactcctgtattcctgtggggagttttatttttaagatgggcatcaaactatatatcccagctgacctagagcttgctatgttgaccaggtgggccccaaatcacagtggtcctcctgcctctgtttcccgaccgctaaggttccaggtcattggatcttgtctgtaatttttaagttcagttcttagaatttgatattgatcaatccagtgtcattgtgtcttccagcctcggtcatgttcacaccttaaatcttattaatctccaaacccaaaatatccaacttttaagttcaccatttaaaacgcctctttgcgtgttaaatactctcactgcacttgaaccaacaccttgtgttcgcacggaccagatagatgatctcacagtttgtcacctgtgtaacaggcaaacccagaggacgcctccaagataatcaaactggaggtttcaaaaataaaacatctgccataaaaaaaaaaaaaaaaaaaaaaaaaaaaaaaaaa

SEQ ID NO: 830 - DNA, 1444 bp, Homo sapiens
ccctctagatcaggacgtcgccggggtggctgtgacttggccaagtgctcgcatgagtcaaatgacaaggaagagacttctgccgtggaacccatgccgcaccggccacctttgccaagaccgcctgtgcctttttctctcgcaggtgcggcggggcatacctgtgatcccagcaattgggagactgagacaggaggatccaaccttcaaagctacatgccatggctgcccaggagtccctgcacgtgaagaccccactacgtgacacgatggcattgtccaaagtggccggcactagtgtgttccttaagatggacagctctcagccctctggctccttcaagatccgaggcattgggcatctctgcaagatgaaggcaaaacaaggctgtaaacatttcgtctgctcttcagtcgtccagatttggggttccagaatgaggggcagaagtcactctggagatgagcagccccacgtgaggtcccaggccctccttcctgatacaccctctccactgacagcgggcaacgcgggcatggcgactgcctatgctgccaggaggctgggcctcccagccactattgttgtgccaagcaccacacctgccctcaccattgagcggctgaagaacgaaggggccacagttgaagtggtgggagagatgctggatgaggccatccaactggccaaggctctggaaaagaacaaccaaggttgggtgtacatctcccccttcgatgaccctctcatctgggaaggccacacttcccttgtgaaggagctgaaggagacactgagcgccaagcccggggccattgtgctgtctgtgggcggtggaggcctgctgtgcggagtggtccaggggctgcgggaggtgggctgggaggatgtgcccatcatcgccatggagaccttcggcgcccacagcttccacgctgccgtcaaggaaggaaagctggtcaccctgcccaagatcaccagtgttgccaaggccttgggtgtgaacactgtgggggcacagaccctgaagctgttttacgaacaccccattttctctgaggtcatctcagaccaggaggctgtgactgctatcgagaagttcgtagacgatgagaagatcctggtggagcccgcgtgtggcgctgccctggctgcagtgtacagcggtgtggtgtgcaggctgcaggctgagggccgactgcaaaccccactggcctcgctggttgtcattgtgtgtggtggcagcaacatcagcctggcacagctgcaggcactcaaggcacagctgggcctgaatgagctactcaagtgatatctgctgctgccctggccaccctgaggggtcaccagcacccctgagtaggctgggtgggcgtccgcctgacagtggcccaccctcctttatccatgtttataatatgcactttttcattgtaaataaaa

SEQ ID NO: 831 - DNA, 1444 bp, Homo sapiens; identical to SEQ ID NO: 830

SEQ ID NO: 832 - DNA, 1444 bp, Homo sapiens; identical to SEQ ID NO: 830

SEQ ID NO: 833 - DNA, 1791 bp, Homo sapiens
cgcccaccttaatgtaggtgaaaggtcggtgtagccgcttggacagcggagcaagatcaagactgccaggagctgcaagtagactgacagaagactgaccatggcagaggagccgaaacccatcagtccgcttaagaacctccttgccggcggctttggcggcgtgtgcctggtgtttgtggggcaccccttggacacggtcaaggtccgactgcagacacaaccaccaagtttgcctgggcagccacctatgtactctgggaccatcgactgtttccggaagactctttttagagagggcatcacagggctgtatcggggcatggctgcacccatcattggagtcacccctatgtttgccgtgtgcttctttgggtttggtttggggaagagactacagcagaaatctccagaggatgaacttacctacccgcagctgtttacagctgggatgttatctggtgtgttcaccacaggaatcatgacccctggagaacggatcaaatgcttactgcagattcaggcttcttcagggaaaaacaaatacagtggtaccttggactgtgcaaagaagctgtatcaggagtttgggatccgtggcttctacaaagggactgtgctcactctcatgcgagatgttcctgccagtgggatgtatttcatgacatacgaatggcttaaaaatctcttcactccacagggaaagagtgtccatgacctcagtgtgcctcgggtcctggtggctggcggctttgcagggatcttcaattgggttgtggcaatccccccagacgtgctcaagtctcgattccagaccgcacctcctggaaaatatcctaatggtttcagagatgtgttgagagagctgatccgagaagaaggagtcacctccttgtacaaagggttcaatgcagtcatgatccgagccttcccagccaatgctgcctgtttccttggctttgaaattgccatgaagatcctcaattggattgcccccaacttgtgaggctgaagactgttgaagacctttggatgctggaagactgttgccgagaagcaggggcaggactgggaagccctgagggtgaggggagggaagtggtgtgatcagagccccaggcatgactgtgatggtgaaactgttgccttaatgacatcctctaccttatgtaacttggtgccattttgaaacttgaatatagaaggtttccagagaattggagatggaataaatagtttatagactcgctacctttgaccaaattgccacctactggttgactgaaggccctacttactatactcaaatactccttaccaaagagttgatggctgactctctggatgccccttgcctattctcaaccagctaacccaggagctggaatctttaattgctagccatgaaaacccaagagatgtccacagtaccatctactcctggccatacacagggatgtggatgtgaagcacacatctgtctgcccaaaggactaggcagacaatacctaaggttagcccacctgttatccactggtttttgatatttttacacaagaaatactaataataaaatgacaattgtctaaaccccctggagaaggtggagaattttccctcctacacagtgaagacagccccagcctcctgggataagtgtgaaagccacaatgtaggaaggctctttttgcacattcttcccccatgagagcactcagttttaacaggaaacaataaatattgtttctaattttaaaaaaaaaaaaaaaaaaaaaaaaaaaaaaaaaaaaa

SEQ ID NO: 834 - DNA, 963 bp, Homo sapiens
ctctttcccgtcttgcaagatggcgggtgaaaaggcggagaagcctgataaaaaggagcagaaacctgcagccaagaaggctggcggtgatgctactgcgccccgcgccggggcctggtgcgtcaaaaagagtagttctaaggctaaaaagctgaggaagagtaagccccattgcagccggaaccctgtcctggtgagaggaatcggcaggtattcccgatctgctatgtattccagaaaggccttgtacaaaaggaaatactctgctgccaagacaaaggttgagaagaagaagaagaaagaaaaggtccttgctaccgtcacaaaaacagttggtggggacaagaacggtggcacccgggtggtgaagcttcgaaaaatgcctaggtattaccctactgaagacgtgcctcggaagctgctgagccacggcaagaagcccttcagccagcacgtgaggcggctgcgctccagcatcactcccgggactgtcctgatcatcctcactgggcgccacaggggcaagagagtggttttcctcaagcagctgggcagtggcttgctacttgtgactggacctcttgccctcaacagagttcctctgcgtaggacacaccagaagtttgtcatcgccacctctacgaaagttgatatcagcaaggttaaaattcccaaacacctgactgatgcttacttcaagaagaagccacttcgcaagcccaggcatcaggagggtgagatcttcgacacagagaaggagaaatacgaaattacagagcagcgaaaggctgatcagaaagctgtggactcgcagattttgccaaagatcaaagctgtcccccagctccagggctacctgcggtctcagttctccctgacgaacggcatgtaccctcacaaactggtgttctaattgttaacaacctaattaaactgcttcataaggaaaaaaaaaaaaaaaaa

SEQ ID NO: 835 - DNA, 963 bp, Homo sapiens; identical to SEQ ID NO: 834

SEQ ID NO: 836 - DNA, 1601 bp, Homo sapiens
cgcatcactagtctgctctccctagctccgagctgctgtggccattgcctccagcgctgttttctgaggcctcgcctccgccgtctttcctgcccgagctccggtgcaaggcctccgctgccagacggtgcctggtgtcccgccgttcccatcctcggttggtccgccgttaggccgtgcctcaggcccaatccgcggcgacgccggcaggtgatgccaaatacagccatgaagaaaaaggtgctgttgatgggaaagagcgggtcggggaagaccagcatgaggtcgatcatctttgcaaattatattgcgcgcgacaccaggcgcctgggtgccaccatcgacgtggagcactcccacgtccgattcttggggaacctggtgctgaacctgtgggactgtggcggccaggacacctttatggaaaattacttcaccagccagcgggacaacatcttccgtaatgtggaggttctgatctacgtgtttgacgtagagagccgcgaactggaaaaagatatgcattattatcagtcgtgtctggaagccatcctccagaattcacctgatgccaaaatcttctgcctggtgcacaaaatggatctggttcaggaagatcaacgtgacctgatttttaaagagcgagaagaagacctgaggcgtttgtctcgcccgctggagtgcgcttgttttcgaacgtccatctgggatgagacgctctacaaagcctggtccagcatcgtctatcagctgatccccaacgttcagcagctggagatgaacctaaggaattttgcccagattattgaggctgatgaagttctgctgttcgagagagctacgttcttggtgatttcccactaccagtgcaaagagcagcgagatgtacaccgctttgagaagatcagcaacatcatcaagcagtttaagctaagctgtagtaaattggccgcttctttccagagcatggaagtgaggaattctaacttcgctgccttcatcgacatctttacatcaaacacgtatgtgatggtggtcatgtcagatccatccatcccttctgcagctactctgatcaacattcgtaatgccaggaaacactttgagaagctagagagagtagatggccccaagcatagcctcctcatgcgctgacataatgccaaatgctctttagtaaatgctgaattatggtgggtttttttttttgcatcatttgtttttaatattcataatgtcatgtgcttaaaagtgggctttgaaacgtgtgcttactatctcatctcttccctagtcttagtattggacgctatttactcagctatccagtagagatcctcaagacggcctttatgaaaagttagtgtggtgttaacactaaagtaggtggtgtgtatgggtgtgtgtgtgtgtgggtgtgttatggttacctggttataatagagtattaaagcagttatcttctgtattatcagatcacaaaggtggaatgttactattttatcagcaagatattaaaatgtatttctaaatcctccttggtttcaatcatgaataaacatttattattagcaatttaaaaaaaaaaaaaaaaaaaaaaa

SEQ ID NO: 837 - DNA, 2395 bp, Homo sapiens
agatcgatctaagatggcgactgtggaaccggaaaccacccctaccactaatcccccacctgcggaagaggaaaaaacagagtctaatcaggaggttgctaatccagagcactatattaaacaccctctacagaacaggtgggcactctggttttttaaaaatgataaaagcaaaacttggcaagcaaaccttcggttgatctctaagtttgatactgttgaagacttttgggctctatacaaccatatccagttgtctagtaatttaatgcctggctgtgactactcactttttaaggatggtattgagcctatgtgggaagatgagaaaaacaaacggggaggacgatggctaattacattgaacaagcagcagagacgaagtgacctcgatcgcttttggctagagacactgctgtgccttattggagaatcttttgatgactacagtgatgacgtgtgtggagctgttgtcaatgttagagctaaaggtgataagatagcaatatggacgactgaatgtgaaaacagagatgcagtcacacacatagggagggtatacaaggaaaggttaggacttcctccgaagatagtgattggttatcagtcccacgcagacacagctacaaagagcggctccaccactaaaaataggtttgttgtttaagaagacaccttctgagtatcctcacaggagactgcgtcacgcaatcgagattgggagctgaaccaaagcctcatcaaagcagagtggactgcactgaagctgactccatccaagtgttgctaagatataagagaagtctcattcgcctttgtcttgtacttctgtgttcattctcctcccccaccccaatttttgctagtgtgtccaccatcccaatcaaagaattacagtatacgtcaccccagaacccacagatgtgttcctggcccgctctgtaacagccgggtagagttaccacgacacacacttgcctttccacagtattcgaaaaagaacgtgcatttctgtcaccttagcaggaaaagatctggttttgttccactccatgcaggagcggatttgctggtgtgagagtctaagtacagctttctagcaaccttctgttttctgtcacagcattgtccttgctgtcctcttgctgatggctgctagatgttaatttatttgcttccctccttgataacattagtgattctgatttcagtttttcatttgttttgcttttgtttttttcctcatgtaacattggtgaaggatccaggactatgacagaaaggtggaataaacattacatttgtgcattctttggtaatttttttgttttttgtaactacaaagctttgctacaaatttatgcatttcattcaaatcagtgatctatgtctgtgtgatccctaaacataattgtggactataaaaatgtaacaccataattacattcctaactagaattagttgtctgcttttgtatctttatgctgtactttaacactttgtattacttaggttattttgctttggttacaatggctcaagtagaaaagcggtcccatccatattaagacagtgtacaaaactgtaaataaaatgtgtacagtgaattgtcttttagacaactagatttgtccttttatttctccatctctagaaggaatctgtactccatattgcaaggcagtctcttgtgtcttcttagtgtcttccccatgcacagcctaagtttggagcactagtttattattatgtttattacaatttttaataaattgaataggtagtatcacatgtaattaaactgatgtggctatcttttttgataaagttaagacacagtttttcagtcttaggttaataatgtacttagaatatgttaaaattcatgagaattgggattttggtgtatcaccatttgataggaacagtggctataaactgagtgttgagtttaagatgtttttacttaatggccagaaaattagaataaggaaggttaggggaatgtgcattaggaacattagtgttactatctgaataaaacataataaacaagtattaagaactatttatattggtcagttgttgcagtatggttctctgtaaacttgaaaccttgatctattccttgtatcatttaaagcaaacatgaagacattttgtctgcactacataactgtgtattgtttggatctagtgaaatgaggtgtggctgtcacagaccaaagggtaagctgaactgtgggtggcagagtggagaccgctggtgagagaagaatgctctgtaagtggttattattatgagttcatccttttcacactggtaacttgataaagatccttataaaataaatatggaattaatagcaaaaaaaaaaaaaaaaaaaaaaaaaa

SEQ ID NO: 838 - DNA, 1685 bp, Homo sapiens
ggggcgcagagcggtttggtcgttcgttggaggagcttcgtcttgttctgctctgcgattgcggcgcttgttcgagcgcttacagcggcgcgtcggtcccagcaagggcctcagacttcagctttgggtgagagaagatggcccgaaccaagcagaccgctaggaagtccaccggagggaaagccccccgcaaacagctggccaccaaggcggcccggaaaagcgcgccctctactggcggggtgaagaaacctcatcgctacaggcccgggaccgtggctctaagagagatccgtcgttaccagaaatcgactgagctgctcatccggaagctacccttccagaggttggtgagggagatcgcccaggatttcaaaaccgacttgaggtttcaaagtgcagccatcggtgcccttcaggaggctagcgaggcatacctggtggggttgtttgaagataccaatctgtgtgccatccacgccaagagagtcaccatcatgcccaaagacatccagttggctcgccggatacggggggagagagcttaagttgaagcgatttttatggcattttgtagtaaattctgtaaaatactttggtttaatttgtgactttttttgtaagaaattgtttataatatgttgcatttgtacttaagtcattccatctttcactcaggatgaatggaaagagtgactgttcacagacctcagtgatgtgagcactgtggctcaggagtgacaagttgctaatatgcagaagggatgggtgatacttcttgcttctcatgatgcatgtttctgtatgttaatgacttgttgggtagctattaaggtactagaattgataaatgtgtacagggtccttttgcaataaaactggttatgacttgatccaagtgtttaaccatacatcactgtgatagaatgtgggctttttcaaaggttgaagatacaagttttagccacagtgtaacagtttcctttaaaaaaaaaaagtaaacctggcagctatagaatacactatgtgcatttataatagctattttatatattgtagtgttcaacatttttaaattaaatgttttacattcacaagtggtggggagtcttgtcattaaggtgtgtgtaatttagtccagttggtatttctgactagactgcatttgtttttaacaaagtagaagaatgctatgcgtattaaaccttgcataagtcctcattctaccacatgttcactaacccctgaccctctggctggtaacacaaaacactaacggggattttctttaagggctctagagtaaaacaacaagctattcacaccagcatcatctgttcctaatctagttagtgagcttttcattgtgtttggtcttacgcctagactgagtttggttttgtttttaatctttaagggggaaaactgtacaaggtttgcttttccttgtggagtttataaacatgggggtaagagtacagcttgagcttattggactctgccaatgaagatgggttaggttacacctggttactatcctggcaaaaaaatcccttttatagagatggccttcaagtggtttttaaaagtatcctattgaagtttttaggtcaattatgtatgttgactaaatttacaaataaacttgtttatccaaaaaaaaaaaaaaaaaaaaaaaaaaaaaa

SEQ ID NO: 839 - DNA, 1494 bp, Homo sapiens
ttccgctcgcgctcccccgccgccatgtcggctaccatcgagcgggagttcgaggaactggatgctcagtgtcgctggcagccgttatacttggaaattcgaaatgaatcccatgactatcctcatagagtggccaagtttccagaaaacagaaatcgaaacagatacagagatgtaagcccatatgatcacagtcgtgttaaactgcagagtgctgaaaatgattatattaatgccagcttagttgacatagaagaggcacaaagaagttacatcttaacacagggcccacttcctaacacgtgctgccatttctggctcatggtgtggcagcaaaagaccagagcagttgtcatgctaaaccgaactgtagagaaagaatcggttaaatgtgcacagtactggccaacggatgaccgagagatggtgtttaaggaaacaggattcagcgtgaagctcttatctgaagatgtgaaatcatattatacagtacatctactacagttagaaaatatcaatagtggtgaaaccagaaccatatctcactttcattataccacctggccagattttggcgttccggagtcaccagcttcattcctaaatttcttgtttaaagttagagaatctggttctttgaaccctgaccatgggcctgcagtgatccattgcagtgcaggcatcgggcgttctggcaccttctctcttgtagatacctgtctcgttctgatggagaaaggagaggatgttaatgtgaaacaaatattactgagtatgagaaagtatcgaatgggactcattcagactccggaccagctcagattctcctacatggccataatagaaggagcaaagtatacaaaaggagattcaaatatacagaacagaacaatgactgagaagtacaacgggaagagaatagggtcagaagatgaaaagttaacaggactttcttctaaggttccagatactgtggaagagagcagtgagagtattctccggaaacgcattcgagaggatagaaaggctacaaccgctcagaaggtgcagcagatgagacagaggctaaatgaaactgaacggaaaaggaaaaggccaagattgacagacacctaaatgttcatgacttgagactattctgcagctataaattttgaacctttgatgtgcaaagcaagacctgaagcccactccggaaactaaagtgaggcttgctaaccctgtagattgcctcacaagttgtctgtttacaaagtaagctttacatccaggggatgaagaacgccaccagcagaagacttgcaaaccctttaatttgacgtattgttttttaacatgtgtatgaattgtagaaagatgtaaagaaaataaaattaggagagactactttgtattgtactgccattcctaatgtatttttatactttttggcagcattaaatatttttattaaatagacaaaaaaaaaaaaaaaaaaaaaaaaaaaaaaaaaaa

SEQ ID NO: 840 - DNA, 1674 bp, Homo sapiens
cagaagcaggaggccgcagttttaggggtccggagagggtcttgagaaacagaggcaacgcgccaactccaagccagaagcgcgagcacctgcacagctccggggtcagacgagcgcaccggtccagcccttgccgcggagccccctgccggctcgttgtgggagccaccagaaggaagcagatcatcttacaactcggtgccatgatgctggccgcccgtctttccagacccctgtcacagctcccaggaaaagctctaagtgtctgtgatagagaaaatgggacaagacacacactgttgttttacccagcttctttcagccctgacacccgtcggacctacaccagtcaggcagatgcggctagtggcaaagctgtcctggttacaggctgtgactctggatttgggttctctttggccaagcatctacactcaaaaggtttccttgtatttgctggatgtttgttgaaggacaaaggcgatgctggggtcagggagctggacagcctgaagagtgaccggctgagaaccatccagctcaatgtctgcaacagtgaggaggtggagaaagcggtggagaccgtccgctccggcctgaaggatcctgagaagggaatgtggggcctggttaacaacgcaggcatctcaacgtttggggaggtggagttcactagcatggagacgtataaggaggtggccgaagtgaacctctggggaactgtgcgcacaacaaaatccttccttccccttctccgaagagccaaaggccgtgttgttaacatcagcagcatgctgggtcgcatggccaacccagcccgctcaccatactgcatcaccaagtttggggtagaggctttctcggactgcctacgctatgagatgcaccctctgggtgtgaaggtcagtgtggtggagcctggcaacttcatagctgccaccagcctctatagccctgagcgtatccaggccattgccaagaagatgtgggatgagctgccagaggtcgtccgcaaagactatggcaagaagtacttcgatgaaaagattgccaagatggagacctactgcaacagcggttccaccgatacgtcctccgtcatcaacgctgtcacccatgccctgactgctgccaccccttatacccgctaccatcccatggactactactggtggctgcggatgcaggtcatgacccattttcctggagccatctctgacaagatctacatacactgaagagctgaagaggtccctgcagcctctgccagggagcctgatgggagggagttcatacagttatcttttgattaaccattgtgggttgtccactgtcttaggaagacctattttaaccttacgtgttcaatgtggtgaatggtttgggccttcacaaatacagggcactggtgggtggccctaaccctcaaggccaatatggtgcttctatctgtctatctagagttgattttatataaagatttgtgggaaatacctttatattaaagacgttattagaatagaatccaaaatcattttcaagccagaacatccatccaaaatatgtatcccatttgatccttaagtaagtctgatgagtaaaaagaacagaatttttaaaaaaaaaaaaaaaaaaaaaaaaaaaaaaaaaaaaaaaaaaaaaaaaaaaaaaaaa

SEQ ID NO: 841 - DNA, 2142 bp, Homo sapiens
ggggccgccgtcgctgtcctagccgccgccgctgccgccgccgccgctgccgtcttcaccgcgggagaaggagcacgagacaggacgcccctgagtgaacgccaccatcctgccgacagctccgcccgggctgcttcctttccgcccaggtccccgtcccctcccccctcaggtgccatccgcctccatccgcgccctcgatccccccatccccaggtgagggggctgagccccggtcgcggaggcccggacgagcccggcagggtcaccatttgcagcgcgacatggcaggagctggaggagggaatgatattcaatggtgtttttctcaggtgaaaggagcagttgatgatgacgtagcagaagcagatataatttctacagtagagtttaatcattctggagaattactagccacaggagataaaggtgggagagtcgtcatctttcaacaagagcaggagaacaaaatccagtctcatagcagaggagaatacaatgtttacagcaccttccagagccatgagccagaatttgactacttgaaaagcttagaaatagaagagaagatcaacaaaattaggtggttaccccagaaaaatgctgcccagtttttattgtctaccaatgataaaacaataaaattatggaaaatcagtgaaagagacaaaagaccagaaggctataacttgaaagaggaagatggaaggtatagagaccctactacagtcactacactacgagtgccggtgtttaggcccatggatctaatggtggaggccagtccgcggagaatatttgccaacgcccatacctaccacatcaactccatttctatcaatagtgattatgaaacctacttatcagcagatgatttgcgaattaatctctggcatctggaaattacagacaggagttttaatattgtggacattaagcctgccaatatggaggagctcacggaggtgatcacagccgcagagttccatcccaacagctgtaacacgtttgtgtacagcagcagtaaagggaccattcgcttatgtgacatgagggcatctgcactctgtgacaggcattctaaactgtttgaagaacccgaagatcccagcaacaggtcgtttttttctgaaatcatctcctcaatttctgatgtaaaattcagccacagtggtcgctatatgatgactagagactatttgtcagtcaaagtttgggacttgaatatggaaaacaggcccgtggagacataccaggtacacgaatacctcagaagtaaactttgctcactgtatgaaaacgactgcatatttgacaaatttgaatgttgttggaatgggtctgacagtgttgtcatgactggatcctacaataatttcttcagaatgttcgacaggaacacaaagcgggatataactctagaagcatcgcgagaaaacaataagcctcgtacagttttgaaaccacgcaaagtctgtgcaagtggcaagcgaaagaaagatgaaataagtgttgacagtctagacttcaacaagaaaatccttcatacagcctggcatcccaaggaaaacatcattgctgtagcgactacaaacaatctgtatatatttcaagacaaagtgaattaggctggcattctctgcagaggagccacttcctgcttagtgagatagttgaatctagcattcgtacctataagagagcggtccattgtggcgtccctttccagtgtttgacagtgtgccattcaacaacacatttgatagccacatggagaaagctgtgcggatgcatcccgggctgtttccatgtctgctagccatttagggaagggaagggcacttttaatttaatgacttcttgcaccatcttgcctggtggactggactggactgtgtcagcattgatgtactccactttttatgccttccattgtgatgacgtcaaacacagtgaacgccttcagtcatgctatggaatttgtgtatcctcattactgtatcatttgtgggagtgcaagggtaatcatttattgaactgcaagagcaagatatttgtgcggaatgatcatgggtggggccaagagaaatttaagaaagcttttaattctcgatgtgttgtcctgggtaactagggaagatg

SEQ ID NO: 842 - DNA, 2070 bp, Homo sapiens
ctctgcgcgctccctgcacctcccgggctgcagcagcccgagaaaacgaaagccaggcgatcccagcacccgcgatcgcgcgggctctgtgctccgagggccgtgctcgcctggtgcctactccagggctgtgtacaccgcgcgggcggcggctgagcccgcaccaggagggcgcgggagccgcagggccctggagctttgggcgactgctacgcggccttggccgaggctcttccttgctcgccgttctgtcgcgggcctggcccgtgaaccgctcacagtatggcccgatgctgcttctacacggcggggacactgtctctgctgctgctggtgaccagtgtcacgctgctagtggctcgagtctttcagaaggcagtggaccagacgatcgagaagaatatggtattacaaaatggtaccaaggtctttgattcctgggagaagccccctctacctgtgtacatccagttttatttcttcaatgtcaccaatccagaggagatcctccaaggagaaatccccctgctagaagaagtggggccgtacacctacagggagctcaggaacaaggcaaacgttcagtttggagaaaatggaacaaccatatctgccgtcaccaataaggcatatatttttgaacgaaaccagtctgttggagaccctaccgttgacttgattagaacaataaatattcctctgttgactgttgtggaaatggcccagcagcccttcctcagggagatcatcgaggccatgctgaaagcttatcagcagacgctgtttgtcactcacactgtacatgaactgctctggggctacaaagatgaggtcttgtcgctcgtccatattttcagacctgacgtctcccctaactttggcctgttctatgagagaaatggaactaatgatggggagtatgtttttctgactggagaggacaattacctgaactttacaaaaattgtggagtggaatggaaaaacgtcgctggactggtggacgacggacacgtgcaatatgatcaacgggacagacggagattcttttcacccattaataagcaaggatgagaccctgtacatcttcccatctgacttctgcaggtccgtctatataactttcagtagctttgagaacgtagaaggactgcctgcttttcggtataaggtgcctgcagaaatactagccaattcctccgaaaacgctggcttctgtatacccgagggaaactgcatggacgcgggagtgctgaacgtcagcatttgcaagaatggtgcgcccattatcatgtctttcccacacttttaccaagccgacgagaagttcgtttcggccataaaaggcatgcgtccaaacaaggaagaacatgagtcatttgtggacattaatcctttgacaggaattattttaagaggggccaagagattccaaatcaacacgtacgttaagaagctggatgactttgtggaaacgggaaacattaggactatggttttcccagtgatgtatctcaatgagagtgttctcattgacaaagagactgcaagtcaactgaagtctgtgattaacacaactttgattgtcaccaacataccctacatcatcatggcactgggcgtgttctttggcttgattttcacgtggctggcgtgtcgaggacaggggtctacggatgagggaactgcagatgaaagggcacccctcatacggacctaatgggacttacctgttgcctgagcttggtgagagaatgtgagaactgacctgacctggaccaggacagggaaaagcctgcatcctcacgggctcctggcctgtcaagaagggagtgaagccgcagcactggcacgcgagaagaccctcctggacagaggggaccgagcaggtgacatggctggcaattacgctttataaaatcatgtctctgaaactgtgtcaatgtgtcttagggagtatttaataaattgtgtagaaacctttaaaaaaaaaaaaaaaaaaaaaaaaaaaaaaaaaaaaaaaaaaaaaaaaaaaaaaaaaaaaaaaaaaaaaaaaaaaaaaaaaaaaaaa

SEQ ID NO: 843 - DNA, 2070 bp, Homo sapiens; identical to SEQ ID NO: 842

SEQ ID NO: 844 - DNA, 807 bp, Homo sapiens
ggggagaggaagatggcggccgccttagctgttcgtggagccgtctctgcaccggcctttgggccggaggcgctcactccagactgggaaaaccgagaagtctccacagggaccacgatcatggctgtgcaatttgacgggggcgtggttctaggagcagactccagaacaaccactgggtcgtacatcgccaatcgagtgactgacaagctgacccctatccacgatcacatcttctgctgccgctcaggctcggcagctgatacccaagcagtagctgatgctgtcacgtaccagcttggtttccacagtattgagctgaacgagcctccactagtgcacacagctgccagtctctttaaggagatgtgttaccgctacagagaagatctgatggcaggaatcatcatcgcaggctgggaccctcaagaaggagggcaggtgtactctgttcccatgggaggtatgatggtaagacagtcctttgccatcggaggctccgggagctcatatatctatggctatgttgatgctacctatcgggaaggcatgaccaaggatgaatgtctgcaattcactgccaatgctcttgctttggctatggaacgggatggctccagtggaggagtgatccgcttggcagccattcaacagtcgggggtagagcggcaggtgcttttgggagaccagatccccaaggtcaccatctccactttgccacctccctgaagcctaggattcccatcccgacgcacaagctaataaacagattgtcaatgaaaaaaaaaaaaaaaaaaaaaaaaaaaa

SEQ ID NO: 845 - DNA, 2573 bp, Homo sapiens
ccgggctcccggcccgggcctcgccatgccgccaccgcccgggcccaccgccgccctgggcactgcgcttctgctgctcctgctggcctccgagtcttcgcacactgtgctgttgcgggcgcgtgaggcggcgcagttcctgcggcccaggcagcgccgcgcctaccaagtcttcgaggaggccaagcagggccacctggaacgggagtgcgtggaggaggtgtgcagcaaggaggaggctagagaggtgttcgagaacgaccccgagacggactatttctatccaagatatcaagagtgcatgaggaaatatggccggcccgaagataaaaacccaaatttcgccacctgtgttaagaacttacctgaccaatgcaccccaaacccctgtgataagaagggcactcaactctgccaagacctcatgggcaacttcttctgcttgtgcaaagatggctggggaggccggctctgtgacaaagatgtcaacgagtgtagtcagaagaatgggggctgcagccaggtctgccataacaaaccaggaagcttccaatgtgcctgccacagtggcttctcacttcaatcagacaacaagagctgccaagatatagatgaatgcacagactcagacacctgtggggatgcgcgttgcaagaaccttccgggctcctactcctgcctctgcgacaaggggtacacttacagctccaaggagaagacctgccaagatgtggatgagtgccagcaggaccgttgtgagcagacctgtgtcaactccccaggcagctatacctgccactgtaatgggcgcgggggcctaaaactgtccccagacatggatacctgtgaggacatcttaccgtgtgtgcccttcagcatggccaagagcgtcaagtccttgtacctgggccgcatgttcagcgggacccccgtgattagactacgcttcaagaggctccagcctaccaggctgctggccgaatttgacttccgtacttttgaccctgagggagtcctcttcttcgccggaggtcgctcggatagcacctggatcgtcctgggcctcagggctgggcgacttgagttgcagctacggtacaatggcgttggacgcatcaccagcagtgggccaaccatcaaccacggcatgtggcaaacgatctctgtggaagaactggaccgcaaccttgtcatcaaggtcaacaaagatgccgtgatgaagattgcggtggctggggggctgttccagctagagagaggcctgtaccacctgaatctcactgtggggggcattcccttcaaggagagtgacctcgtccagccgattaaccctcgcctggacgggtgcatgaggagctggaactggctgaatggggaagacagtgccattcaggaaacggtcaaggccaatacaaaaatgcagtgcttctctgtgacagagaggggctccttcttcccggggaatggatttgccttctatagcctcaactacacccggacatcgctggatgtcggcacggaaaccacctgggaagtagaagtcgtggctcgcattcgccctgccactgacacgggggtgctgatggcactggtgggggacaaagacgtcgtcctcctctctgtggccctggtcgactaccactccacaaagaagctcaagaagcagctggtggtcctggcagttgagaatgttgccctggccctgatggaaatcaaggtgtgcgacagccaggaacacactgtcactgtctccctgcgggatggcgaggccaccctggaagtggatggtaccaagggccagagcgaagtgagcaccgcacagctgcaggagcgactggacctgcttaagacacgtctgcaaggctccgtgctcacctttgtggggggcctgccagatgtacaagtgacttccacacccgtcacggcgttctaccgtggatgcatgactctggaggtaaacgggaagaccctggacctggatacggcctcctacaagcacagtgacatcacctcccactcctgcccgcctgtggagcacgtcacagcctagaccgagctgcaagagttctctacacctaaaagacacggtgaagcagggtcagggacacacagcaccatctcctctcgcatgggccctgcaacactggagcaggtgcagggctacgatgggtactacgtactgtccgtggagcagtaccccgagctggctgacagtgccaacaacatccagttcctgagacaaagcgagatcggcaagaggtaacccccgggccacccctgcgcagattctcctgtagcacaaaccgaaccggactctccaaagagccttccagaatgacactgctctgcagacaccctcggcgcagacacaggcaacacaaaccagaaacaaagacgactttttttttctctaaatgaccttaaaggtgatcggctttaaagaatatgtttacatacgcatatcgctgcactcaattggactggaagtatgagaaggaaaaaaaagcattaaaaaggcaacgttttgccatgaccctctgtaccttcgaggcactgtatttaacaaaagtttt

SEQ ID NO: 846 - DNA, 1978 bp, Homo sapiens
gtggtgcggagcgagtcgactttggactactctcttagcgtggcgtcgcgcgaggctgcggcggagcctctgtcaggaaggcgggagcttgacagcttcagtaaagaccagcagcggtgacagcaacccggagtcatgagcgacagcggcgagcagaactacggcgagcgggaatcccgttctgcttcccgaagtggaagtgctcatggatcggggaaatctgcacggcacacacctgcaaggtctcgctccaaggaagattcaagacgttctagatcaaagtcaagatccagatctgaatctaggtctagatccagaagaagttctagaaggcattatacaaggtcacgatcacgatctcgctctcatagacgatcccggagcaggtcttacagccgagactatcgcagacgccacagccacagccattctcccatgtctactcgaaggcgtcatgttgggaaccgggcaaatcctgaccccaactgttgtcttggagtgtttggattgagcttgtacaccacagaaagagatctaagagaagtgttctctaagtatggccccattgctgatgtgtctattgtgtatgaccagcagtctagacggtcaagaggatttgcctttgtatattttgaaaatgtagatgatgccaaggaagctaaagaacgtgccaatggaatggagcttgatggacgtcggattagggtcgatttctctataacaaaaaggccccataccccaacaccaggaatttatatggggagacccacttatggcagttcacgacgccgggactattatgaccgaggatatgatcggggttatgatgaccgggactattacagcagatcatacagaggaggaggtggaggaggaggtggatggagagcagctcaagatagagatcagatttacagaaggcggtcaccttctccttactacagtcgtggaggatacaggtctcgttctcgatcaagatcctactcacctcgtcgctattaaagcatgaagttgaagactttctgagacctgccatagagctgggatgttgtttgtggacaatattttctattgtctcctgtttaaaaagtgaacagtgcctagtgaagttaggtgacttttacaccttttatgatgactacttttggtggagttgaaatgctgttttcattctgcatttgtgtagttcggtgctttgttcaaagttaagtgttttcagaaaagtatgttttgcatgtatttttttacagtccaaattttgactgctgagaagtttctattgtacaaaacttcatttaaaaggtttttctactgaatccagggtattctgaagatcgaagcctgtgtgtaaaatgctaccagatggcaaaaagcaacaataaacaagtttgatttttacttttctttctaaatatcaatgcttaacaagaaccattcttaagttatcagtaaaaaataaataaataaaaattttctttcaggagtccatgaaacttgccatattcgatatacctgcaattaagtgttaaaaatacgctgtaactctgtactgctagtattagaacaagaatctttccatacagctaatgcttaatgcttacattaatgtggatttgtcggcctttatgtaatctgtattatatatagcaggggataagagctacagatagatacatgcctttaaaaggctgtttcttaaggctgttacaaggagataatggtatttcaactaatcagcaagtgacaatacattccaccacaaatgtactcttgttcttctagcctttagactatgaaaatactgggtgcttcaaagtatggaatgagagaagggatcaccacacctgtgtcatggatgaagactgcctgttcattttttaaatatgattttcaggtcctttgcttaccaaaggaagcccaattcactcaaatgttttgagaactgtttaaataaacaagcaagaaaaattgctgatgc

SEQ ID NO: 847 - DNA, 1376 bp, Homo sapiens
ggcttggtcactatggaggagataggcattttggtggagaaaattcaggatgagatcccagcactgtccgtgtctcggccgcagaccggcctgtcctttctgggacccgaacctgaggacctggaggacctatacagccgctacaagaagctacagcaagagctggagttcctggaggtgcaggaggagtatatcaaggatgagcagaagaacctgaagaaggagttcctccatgcgcaggaggaggtaaagcgaatccagagcattccgttggtcattggtcagtttttggaagctgtggatcagaacacagccattgtgggctctaccacaggctctaactactatgtgcgcatcctgagtaccattgatcgggagctgctcaaacccaatgcctcagtggccctgcacaagcacagcaacgcactggtggatgtgctgcctcccgaggccgacagcagcatcatgatgctcacctcagaccagaagcccgacgtgatgtacgccgatattggaggcatggacatccagaagcaggaggtgcgggaggctgtggaactaccactgacgcacttcgagctctacaagcagattggcatcgatcctccccgaggtgtcctcatgtatggcccacctggctgtggaaagaccatgttagcgaaggctgtggcacatcacacgacagctgcatttatccgtgtggtgggctcagagtttgttcagaagtacctgggtgagggcccccgaatggtccgggatgtgttccgcctggccaaggagaatgcacctgccatcatcttcatagatgaaattgatgccattgccaccaagagattcgatgcccagacaggagctgacagggaggttcagaggatcctgctggagctactgaatcaaatggatggatttgaccaaaacgtcaatgtgaaggtaatcatggccacaaacagagcagacaccttggatccagctctacttcggccaggacgcctggaccgcaaaattgaattcccactccctgatcgtcgccagaagaggttgattttctccaccatcaccagcaagatgaacctttctgaggaggtcgacctagaagactatgtggcccgcccagataagatttcaggagccgatatcaactccatctgtcaggagagtggaatgttggctgtccgtgagaaccgctacattgtcctggccaaggacttcgagaaagcatacaagaccgtgatcaagaaagatgagcaggaacatgagttttacaagtgacccctccccacactccccaggcacctgtcccaaaggctagttttctctttacccaggattggtttcgtcaataaatggacgtgattggaaaaaaagcggccgcgaat

SEQ ID NO: 848 - DNA, 1556 bp, Homo sapiens
acgactgaaggagagatgggtcaaagtcagagtggtggccatggtcctgggggtggcaagaaggatgacaaggacaagaaaaagaaatatgaacctcctgtcccaactagagtggggaaaaagaagaagaaaaccaagggaccagatgctgccagcaaactgccactggtaacacctcacacccagtgccgcctgaaattactaaagctggagagaataaaagactatcttctcatggaggaagaattcattagaaatcaggaacagatgaaaccactagaagaaaagcaagaggaggaaagatcaaaggtggatgatcttaggggaaccccgatgtctgtaggaaccttggaagagatcatcgatgataatcacgccattgtgtccacatcggtgggctcagaacactacgtcagcatcctgtcatttgtagacaaggatctgctggaaccgggctgttcagtcctgctcaaccacaaggtgcatgctgtgataggggtgctcatggatgacacggatcccctggtcacagtgatgaaggtggaaaaggccccccaggaaacctatgcagatattgggggactggacaaccagatccaggaaattaaggaatctgtggagctccctcttacccaccctgagtattatgaggagatggggataaaaccacctaagggggtcattctctacggcccgccaggaacaggtaaaactctattggccaaagcagtagcgaaccagacttcagcgactttcttgcgagtggttggctcagagcttattcagaagtacctaggtgacgggcccaagctggtccgggagctcttccgggtcgctgaggaacacgcaccgtccattgtgttcattgatgaaatcgacgccattgggaccaaaagatatgattcaaactctggaggtgagcgggaaatccagcggacaatgttggaactgttgaaccagttggatggatttgattcgaggggagatgtaaaagttatcatggccacaaaccgaatagaaactttggatccagcacttatcagaccaggccgcattgacagaaagatcgagttccccctgcctgatgaaaagaccaagaagcgcatcttccagatccacacaagcaggatgacgctggctgatgatgtaaccttggatgacttgatcatggcaaaggatgacctctctggggctgacatcaaggcaatctgcacagaggctggcttgatggctctgcgggaacgcaggatgaaagtgacaaacgaagacttcaagaaatctaaggagaacgttctgtataaaaaacaagaaggcacccctgaggggctgtatctctagtgacacagttgtcttcagggaacttaatgagtttcccccacctgggaagatgggaagctgccccaaggaatccatcttccagttaagttttgctagtagaaagcccgtgtcgtggaggacgctgtgtggtctgtctccaatctgttgttggtcattgtgccctgcagctctccgctcccaataaaggattgtcctggtttgctttctaaaaaaacaag

SEQ ID NO: 849 - DNA, 1111 bp, Homo sapiens
agagccaggaagaaacaggaacaagacacagaccatgagctccagccaatcaggggtctgcccatgccagggctctgcaagccaccccaccattctctacacacttctaagccccggtcccaggaccaggcccatggcacccgcatctcgcagccactgcctgtgccagcaacaccggcctgtgcgcctgtgtgctccacaccgcacctgcagggaggccttggatgtcctaggcaagactgtagccttcctcaggaacctgccgtccttctgcctcctgccccatgaggatcagcgacggctgctagagggctgctggggccctctcttcctgcttgggttggcccaggatactgtgacctttgaggtggccgaggctccggtccccagcatacttaaaaagatcttgctagaggaacccaacagtggtgcccagggtgcccagccaccagacccaccacaaccctcactggctgccgtgcagtggctgcagcactgcctggagtctttctggagccttgagctgggtcccaaggagtacgcatacctgaaaggcactatcctcttcaacccagatgtgccaggcctccatgcctcctgccacattgcacacctgcaacaggaggctcactgggcattgtgtgaagtcctggagccctggtacccagctagccaaggccgcctggcccgaatcctcctcatggcttccaccctcaagaacatctcctgtacccttctggtagatctcttcttccgccctgtcatcggagatgttgacatcactgaactgcttgaagacatgcttttgttgaggtgacctgtagaatggggtccggtgcctccaaaggggagcctgaaaggccgcactcagctcccctggagcagccctcgtctcagccccacccccagcttggatttcctcggtttgcatacagtgtttgactaactgtccagcaggcccttgatggctcccaaaacctccaggccaatatgccttcccttacctgggtagggatgggagcatgaggctgtgcttcagggcagaattcctccagactttatatagaactaagttaagttattggtttttgtaataaaaggtgtgaactgc

SEQ ID NO: 850 - DNA, 1111 bp, Homo sapiens; identical to SEQ ID NO: 849

SEQ ID NO: 851 - DNA, 1071 bp, Homo sapiens
gcaagccagtgttaggaagtcgccccgtgatcgcgccgccttgggtttttctgttctttttttctctgtttatgtgcaaagctgccagcagcccatagaaacatgaccaccaatatgctccccttacacccgtactggcccaggcacctgagactggacaacttcgtgcctaatgacctcccgacttggcatatcctggttggcctattctccttctctggggtcctaattgtgatcacgtggctgttgtctagccgagtttctgttgtcccacttggaactgggcgtcgactggccctgtgctggtttgctgtgtgcacattcattcaccttgtgatcgagggctggttctctttctaccatgaaatccttctcgaagaccaagccttcttatcccaactctggaaagaatattccaagggagacagccgatatatccttagtgatggcttcatcgtctgtatggagagtgtcacagcttgtctctggggaccactcagcctatgggtggtgatcgcctttctccgtcatcaacccttccgctttgtcctacagcttgtggtgtctgtgggccagatatatggggatgtgctgtacttcctgaccgagctccgcgatggattccagcatggagagctaggtcaccccctttatttctggttttacttcgttatcatgaatgccatatggttggtgataccgggcatccttgtgtttgatgccatcaagcatctcacaaacgctcagagcatgctggacaacaaagtcatgaaaattaagagcaagcataactaaagagacggagagtgagctgagacctgtctgaggaggcgctctccccgcttaccagaagactcgaatcctcctcctcctcttcctccttctcctcgaacagttttggagggtcagagctatgggatttgccacactcaaagggccagagtcagaaaaggtagggaacatgcggagctactgccagggaccatagagaaagggtggaagagaagatgggaagtccctgtccaaaaccaggaaataaaacgtctttaactataaaaaaaaaaaaaaaaa

SEQ ID NO: 852 - DNA, 2563 bp, Homo sapiens
attggtggatccatttagttcaagaaaatggagaccgaacagccagaagaaaccttccctaacaccgaaaccaatggtgaatttggtaaacgccctgcagaagatatggaagaggaacaagcctttaaaagatctagaaatactgatgagatggttgaattgcgcattttgcttcagagcaagaatgctggggcagtgattggaaaaggaggcaagaatattaaggctctccgtacagactacaatgccagtgtttcagtcccagacagcagtggccccgagcgcatactgagtatcagtgctgatattgagacgattggagaaattctgaagaaaatcatccctactttggaagagggcctgcagttgccatcacccactgcaaccagccagctcccgctcgaatctgatgctgtggaatgcttaaattaccagcattataaagggagtgacttcgactgcgagctgagactgttgattcatcaaagtctggccggaggaattattggtgttaaaggtgctaaaatcaaagaacttcgagaaaacactcagacaacaatcaagcttttccaggaatgctgccctcattctactgacagagttgttcttattggaggaaagcccgatagggttgtagaatgcatcaagatcatccttgaccttatatctgagtctcccatcaaaggacgtgcacaaccttatgatcccaacttctatgatgaaacctatgattatggtggttttacaatgatgtttgatgaccgccgaggacgacctgtgggattccccatgcggggaagaggtggttttgacagaatgcctcctggtcggggtgggcgtcccatgcctccttctagaagagattatgatgatatgagccctcgtcgaggaccaccaccaccaccacctggtcgaggtggacggggtggcagcagagctcggaatcttcctcttcctccaccaccaccacccagagggggagatctcatggcttacgacagaagaggacggcctggagaccgctatgatggcatggttgggttcagtgctgatgaaacttgggactctgcaattgacacatggagcccatcagaatggcaaatggcttatgaaccacagggtggttctggatatgattattcttatgcagggggccgtggctcgtatggtgatcttggcggacctattatcactacacaagtaactattcccaaagatttggctggatctattattggcaaaggtggtcagcggattaaacaaattcgtcatgagtctggagcatctatcaaaattgatgaacctttagaaggatctgaagatcggatcattaccattacgggaacacaggaccagatacagaacgcacagtatttgctgcagaacagtgtgaagcagtattctggaaagtttttctaagactagtgaagaactgaaggagtcctgcatctttttttttttatctgcttctgtttaaaaagccaacattcctctgcttcctaggtgttctgcatttgaggtgtagtgaaatctttgctgttcaccagatgtaatgttttagttccttacaaacagggttggggggagggcatgcaaaaaaactaacattgaaattttgaaacagcagcagagtgagtgacttttattttttgttcattgttggtggttttaaaaattccccccgtgtaattattgtgaacaccttgctttgtggtcactgtaacattggggggtgggacagggaggaaagtaatagtccacatgtccctggcatttgttcagagcagtgtgcagaatgtaatgctcttttgtaagaaacgttttatgatttttaaaataaatttagtgaatctatttttggtggtctttttttttttttttaaagacaatttcaaatggtggttgaattttccagcccacccctaaactaaacactaagtttgattttcagcagctcctctgttggatataagtgcacctcttggatatagacaaacacattggcaaatttcagtttgggtgatttcttaatggttggaaagacttggcttgataaatttccatcacatattcatgcttataataagcttgggattttgtttgtttttgcaaatgtttgccactacttttcaacagttttctgttagtcgtggggaactgcggtggggagcaatactacaagagtaagcatctgagtatgtgccagaagcctggtgggcaatgagctttattaaccagagtaacacttggttatggaagtggctgatgctgaataaatcctggttatttttgttagataatttctcacctatagacttaagctgtcaactgctagcgtcttgttagttgaactttgtaaaaatatatatatacttgtttttccattgtatgcacaatgaaagaaaaaagatgtaccatttctctgttgtgtgttgaattatgtaggaaatgtttgtgaacgattcaaaaaaaatggaaaagttcctgtggatgttttgtgtagtaacttggcatctgtattgatagttccaaatccacatctaaataaaacttcatgatgtta

SEQ ID NO: 853 - DNA, 1109 bp, Homo sapiens
gaattccctgctgcaaacatggcgctgctggcccgtgcgttctttgctggggtgtcccgcctcccctgcgatcccggtcctcagaagtttttcagctttggaacgaaaaccctgtatcaaagcatcgatgctccacagtctaaattcttcccacccattttaaagcctatgctaccacctaatgcctttcaaggaaaagtggctttcatcacgggaggaggcactggccttggcaaggcaatgacaactttccgctccagcctgggtgcccagtgtgtgatcgcgagcaggaatattgatgttctgaaagctactgcagaagagattacttctaaaactggaaataaggtctatgcgattcggtgtgacgttcgagatcctgatatggtacacaacacagtactggagctgatcaaagttgcagggcatcctgatgtggtgataaacaatgcggcagggaacttcatttctcccagtgagagactgtctcccaatggttggaggaccataactgacatagttctcaatggtacagcctatgtgacgatagaaattggaaagcagctaattaaagcacagaaaggagtcgcctttcttgctatcactacgatctatgctgagagcggatcaggctttgtaatgccaagttcttcagccaaatcaggcgtggaagccatgaataagtctcttgcagctgaatggggtagatacggaatgcgtttcaacataattcagccagggcctatcaaaaccaaaggtgcctttagccgtttggacccgactggaaaatttgagaaagatatgatcgagagaatcccctgtggtcggctgggaactgtggaggaacttgccaatctagcgactttcctttgcagtgattatgcctcttggatcaatggggcagtcattcgatttgacggtggagaggaagtgtttctgtcaggtgaattcaactctctaaagaaggtcaccaaggaggagtgggatgtaatcgaaggcctcatcagaaagacaaaaggctcctaagacgttcatggcttcctctgtgacaaactaaagtttagggactatatagatggacatttgagttaataaattttttgtctgat

SEQ ID NO: 854 - DNA, 1109 bp, Homo sapiens; identical to SEQ ID NO: 853

SEQ ID NO: 855 - DNA, 543 bp, Homo sapiens
ggggtctcttctctctttctctcgggcccgtggcgccggcaagatgggtaagtgtcgtggtctccgtactgcccggaagctccgcagtcaccgacgggaccagaagtggcatgataaacagtacaagaaagcccacttgggcacagccctgaaggccaatccgtttgggggtgcctctcacgcaaagggaattgtactggaaaaagtaggggttgaagccaaacagccaaattctgccatccggaagtgtgtcagggtgcagctcattaagaacggcaagaagatcacagcattcgtgcccaatgacggttgcttgaacttcattgaggaaaatgatgaagttctggttgctggatttggtcgcaaaggccatgccgtgggtgatattcctggagtccgctttaaggtggttaaagtagccaatgtgtctcttttggctctgtacaaaggcaagaaggaaagaccaagatcataaaattttgacaatggaaacagaataataaattttcatatcaaaaaaaaaaaaaaaaaaaaaaaaaaaaa

SEQ ID NO: 856 - DNA, 5174 bp, Homo sapiens
gggttgagctgaactgagatcccaagaccagcggtgcaccagagccacatggaccgcttgtgcggctccggggagctgggctccaagttctgggactccaacctgactgtatataccaacactccagacctcacaccctgtttccagaactccttgctggcctgggttccctgcatctatctgtgggctgccttgccctgctacctgttctacctgaggcaccatcggcttggctacatagtcctctcatgcttatccaggctcaagacggccctcggtgttctgctgtggtgtatctcatgggtggacctgttctactccttccatggcctggttcacggctcatcccctgctcctgtcttctttatcacacccttgttggtggggatcaccatgctgctggccacattgctaatccagtatgagcggcttcggggcgtgcggtcttcaggtgtgctcatcatcttctggctcctgtgtgtgatctgtgccatcatccccttccgttccaagatcctcttggctttggcagagggtaaaatcttggatccgttccgattcaccactttctacatctacttcgccctcgtgctgtgtgccttcatcctgtcctgcttccaggagaagccgcctttgttttccccagagaatcttgacacaaatccttgcccagaggccagcgctggcttcttctcccgtctgtctttctggtggttcacaaagcttgccatccttggctaccgacgtcccctggaggacagtgacctctggtctctgtctgaggaggactgctctcacaaggtggtacaacggctactggaagcatggcaaaagcagcagacccaagcatcagggccccagactgcagcccttgagccaaagatcgcaggtgaggatgaggtcctgctgaaggcccgccccaagaccaagaagccttcctttctgagggctttggtgagaaccttcacctccagcttgctcatgggtgcctgcttcaagctgatccaggacctgctctccttcatcaacccacagctgctcagcatcctcatcaggtttatttctgaccccacggcccctacctggtggggcttcttgctggccggactgatgttcgtgagctccaccatgcagacattgatcttacaccaacattaccactgcatctttgtgatggccttgaggatacggactgctatcataggcgtcatctacaggaaggctctgaccatcaccaactcagtcaaacgtgagtacactgtgggagaaatggtcaacctcatgtcggtggacgcccagcgcttcatggatgtctccccattcatcaacctgctgtggtctgcacctttgcaggtcatcctggcgatatacttcctctggcagatcttaggcccatcagccctggctggggtggctgtgatagtcttgctgataccactcaatggagctgtgtccatgaaaatgaagacctaccaggtacagcaaatgaagttcaaagactcccgcatcaaactgatgagtgagatcctgaatggcatcaaagttctgaagctgtacgcttgggagcccaccttcttggagcaggtagaaggaatcaggcagggtgagctccagctactgcggaagggcgcctacctgcaggctatctctaccttcatctgggtctgcaccccgtttatggtgaccctgatcaccctcggggtgtacgtgtgtgtggacaagaacaatgtgctggatgctgagaaggccttcgtgtccctgtccttgttcaatatcttaaagatccccctcaacctgctgcctcagttaatcagtggcatgacccagaccagcgtgtctctgaaacggatccaggatttcctgaaccaagatgaacttgacccccagtgtgtggaaagaaagaccatctccccaggccgtgccatcaccatacacaacggcaccttctcctggtccaaggacctgcctcccacccttcacagcctaaacattcaaatcccgaagggggcattggtggctgtggtgggacctgtgggctgtgggaagtcttccctggtgtctgccttgctcggagagatggagaagctggaaggtgcagtgtctgtaaagggctctgtggcctacgtgccccagcaggcgtggatccagaactgcacacttcaggaaaatgtgctatttggccaacccatgaaccccaagcgctaccaacaggctctggagacgtgtgccctgctagctgacctagatgtgcttcctggtggggaccagacagagattggagagaagggcattaacctatctggaggccagcgacaacgggtgagtttggcccgagctgtttatagtgacgccaacatttttttgctggatgacccactgtcggctgtggactctcacgtggctaagcatatcttcgaccaagtgattggaccagaaggtgtgctggcaggcaagactcgggtgctggtaacccatggcatcagcttcctgccccagacggactttatcattgtgcttgctgacggacagattactgagatgggtcactactccgaactcctgcagcacgatggctcctttgccaacttcctccgaaactatgcaccagatgaaaaccaggaggccaatgaaggagtcttgcaacatgcaaatgaggaggtgctcctgcttgaagacacactcagcacccacacagacctgacagacaccgagccagccatatacgaggtccgcaagcagttcatgagagagatgagctccttgtcttctgaaggagagggccagaaccggcctgtgctcaagagatatacgagttcactggagaaggaggtgccggcgacacagactaaagagactggtgcattaatcaaagaggagatcgcagagacaggcaatgtgaagctgagcgtgtactgggattatgccaagtctgtggggctctgcaccacgctgtttatctgcctcctgtatgctggccaaaatgcggttgctatcggagccaatgtgtggctcagtgcctggaccaatgatgtggaggaacatggccagcagaacaacacctccgtaaggctgggagtctacgccaccctaggaatactgcaagggctcctggtcatgctgtcggccttcaccatggtggttggcgctatccaggctgcccgcctgctgcacacagctctgttgcacaaccagatccgtgcgcctcagtccttctttgacacgacgccctcaggccgcatcctcaatcgtttctccaaggacatatacgtcatcgatgaggttctggcccccaccatcctcatgctgttcaattcattctacacatccatctccaccattgtggtcatcgtggccagcacgccactcttctgcgtggttgttcttcctctggctgtgttctatggcttcgtgcagcgcttctatgtggccacatcgaggcagctgaagagactggaatccgttagccgctcgcccatcttctcccacttctcggagacagtaactggcaccagtgtcattcgggcctacggccgagtccaagacttcaaggtcctcagtgatgctaaggtggatagcaaccagaagaccacttatccttacatcgcctccaaccggtggctgggtgtccacgtggagtttgtggggaactgcgtggtgctcttctccgcgctgtttgcagtgatcgggagaaacagcttgaatccagggcttgtgggtctttccgtgtcctatgccttacaggtgaccttgagtttgaattggatgatacggacgctatccgacctggagtctaatatcatagccgtggagagagtcaaggagtactctaagacggagactgaggctccctgggtgttggagagcaaccgtgctccagaaggctggcccaggagtggggtggtagagttccggaactattcggtgcggtaccgcccgggcctcgagttggtgctgaagaatttgactctgcatgtgcagggtggggagaaggtaggcatcgtgggccgcactggggctggcaaatcttccatgactctttgcctattccgaatcctggaggccgcagagggtgagatcttcattgacgggctcaatgtggcacacattggcctccatgacctgcgttcacaactcaccatcatccctcaggaccccatcctgttctcgggcacgctgcgcatgaacctcgatccctttggccgttactcggacgaggacatctggaggaccctggagctatcccacctgagtgcatttgtgagcagccagccgacaggcctggattttcagtgctctgagggtggggataatctcagtgttggccagaggcagctcgtgtgcctagcccgagccctgctccgaaagagccgtgtcctggttttagacgaggccaccgctgccattgacctggagactgatgacctcatccagggtaccatccgtacccagtttgaagactgcactgtactgaccatcgcccaccggctcaacacaatcatggactacaaccgggtcctggtcttggacaaaggagtagtagctgaatttgattctccagtaaacctcattgcagctggaggcatcttctatgggatggccaaagatgcaggactcgcctagaatctgcattccaaaggtttcttccttgtctgaatcggacagcaagtagctgcagcatggatttgatggcaacgagtggggacatttgagttggttttggtttttttttgttttttgttttttttttttttttaaattctgcaaattgccttacagactagccatacttaacagtggaatgaggaagtgggtccttggaggtcacagccagttcacagccaagttcagaccagtccctgggtctcctagacctagtctaccattattcccgtactgcatttttttttggttctttttttcagagctggggaccgaacccagggccttgcccttcctaggtaagcgctctaccactgagctaaatccccagcccccgtactgcagtttttaagagaccctgctcctgcctctacatattcatagtttccaattttttttttaaatgagcctttctccttctggaccagggactgctaggtcagtctgtccggggaacagaatccctggttggtgctgtctgaatccactgacgaaataaagccatgagcagcagc

SEQ ID NO: 857 - DNA, 1018 bp, Homo sapiens
ggatctgtgcggcgctcctcgggggcagcggccgagtgggcttgccgtggatgcagaagggcttcgctcggacccgggacactacagtttctccgtgcaagctccggagctcgcgcttccccggggaatgcagcccactgaattcctgaggtcctttggtgatgaccaggaaaggaaggttcagattgaaatggcgcatggcacaaccacgctggccttcaaattccagcatggagtcatcgtggctgtagactccagggcctctgcagggagttacattgctaccataagggtgaacaaggtgatcgagattaacccttacctgcttggaactatgtctggttgtgcagccgactgtcagtactgggagaggctgttggccaaggaatgcaggctatactatctgcggaatggggaacgcatctccgtgtctgcagcctccaagctactttccaacatgatgctgcagtaccggggtatgggcctctccatgggcagcatgatctgcggctgggacaagaagggaccgggactttattacgtagatgacaatgggactcggctctcgggacagatgttctccacaggcagcgggaacacctatgcctacggggtgatggacagtgggtaccggcaggatctcagtcctgaggaggcctacgaccttgcccgaagagctattgtttatgctacccacagagacagctattctggaggagttgtcaacatgtaccacatgaagaaagacggttgggtgaaagtggagagcactgacgtcagtgacctgttgcacaagtaccgagaggccactctgtgatcactgctgggcagacatcctcccggccctgaggagctggcagactcagggacctggggctacttcagtcttaggagaaagacgggcccaacctgggctggagacaaagctctgaggctatggagacatctttgtttaccctctcactcagccagccctcacggataccttctaagtacaataaaagaaaaacagttctac

SEQ ID NO: 858 - DNA, 1712 bp, Homo sapiens
ggccgctgcacctgcccggtcttgcgccgagaccgctgtcaatcgcggggcaccaggaataaaaggccccttgcagagatttgaaaatggccatgaacaaaagtgttggcctcttcagctccgcatccctggctgtggactacgtagattccctgctgcctgagaatcctctgcaggaaccctttaagaatgcttgggtctacatgttggacaactatacaaagttccagatcgcaacctggggctccctgatcgttcatgagacgatctatttcctgttctctttacctggctttctattccagtttatacctttcatgagaaagtacaagattcaaaaggataaaccagaaacctttgaaggccagtggaagtgtttgaaaggaattctgtttaatcatttttttatccagttgcctctgatttgtggaacatactattttacagagtttttcaatattccttatgattgggaaagaatgccaagatggtatttcactttggcaaggtgtttgggctgtgcagtcatcgaggatacctggcactatttcctgcacagactccttcaccacaagaggatttataaatacattcataaagtccatcacgagttccaggctccatttggaatcgaagcagaatatgcacatcccttggaaaccctaattcttgggactggatttttcattggaattgtgcttttgtgtgatcatgtaattcttctgtgggcatgggtgaccatgcgtttgctagaaaccatcgatgtgcacagtggttatgatatccctctcaacccgttgaactacatccctttttataccggggctcggcatcacgatttccaccacatgaacttcattgggaattacgcctccaccttcacgtggtgggacagaatctttgggacggatgtccagtaccatgcctacactgaaaagatgaagaagcttgggaaaaagtctgagtgagcacctgctctccgccctcctgactgcagctggcaactaacattgcttctggggagcagaactaagcacgtgactcggctgctggtgataggaacattaacaacctttaagtactctgcgggatgagaactcttctgctcgacacccaagatctgtaaatgtgggaacaaagaaatagatacataagtacagttttcaggaggaggttttaaaggccatattgccaacctcaccgaaaggtttcaggaacccgaggaagtgttaatgtacaactcaccacttcacgccacccgaggctgaagttgacgttgccttttaagcctttttacatacactggccatttcagaaaattctcaacaataatgtctgccttcgagtttaagtcatggtgttttttagaattgacttgaaatgaaaatatcacaaagtgaatatatcagctggtgatcgagtgactgaaacccccctggtctgcggttgaccagttcaggactattctttctgtgaaggattgtttgattgtagtatctttatcagcatcttgtaaattggctcatttcctacgtgatgtacatagaatactataacttaacgactttcaagttacttggggcatttttaaattgaggagccccacttctgatgtccacccccttgtctttgtgtgtcaggtggtctcggagctttgtgaattctctatctgcacctgtcagagctggtgaaataaatgtgatttttgtccg

SEQ ID NO: 859 - DNA, 1712 bp, Homo sapiens; identical to SEQ ID NO: 858

SEQ ID NO: 860 - DNA, 3219 bp, Homo sapiens
ccgaccatgtctcacttagtcgagccgccgccgcccctgcacaacaacaacaacaactgcgaggaaggggagcagtccctgccgccgcccgctggcctcaacagttcctgggtggagctacccatgaacagcagcaatggcaacggtaatggaaatgggaagaatgggggcctggagcacgttccttcctcgtcttccatccacaatggagacatggagaagatccttctggatgcgcagcatgagtcgggacagagcagctcaagaggcagttctcactgtgacagcccttcaccacaagaagacgggcaaataatgtttgatgttgagatgcacaccagcagggaccacagctctcagtcagaagaagaagttgtagatggagaaaaagaagttgaggctttgaagaaaagtgcagactgggtatcagactggtccagtagacccgaaaacatcccacccaaagagttccatttcagacaccctaagcgtgcagcctctctaagcatgaggaagagtggagccatgaagaaagggggcattttctctgcagagttcctgaaggtcttcatcccatctctcttcctctctcacgtgttggctttggggctgggcatctatatcggaaaacgactgagcacaccttctgccagcacctactgagggagacgaaaagcccctgggaatccgtgtggcctgtgaagtggtgtattgtagtttgaatttgagacctattgtaagcatgatccccacctacaaccctatttttacatgcccaattccaagtaactctcaaatccagtattttactcaaactctgttggggcattttactaaccttgttccctttttggcctgtaaaacactttagagattcctaacagagtttactgttgtttagaaatttgcaagggcttttttcagcaacgccaccagcagattataatcttgtcaacagtgcatcgtctcctcttagtaccactagtcacacctgcatcattcatgctagaagctgtgttctagccatgcaattacatctctttctaaatgaggtcaggtttgcaaataatactatgaaagctttgtttagtctttgttttgttttccaggacaaaaacaagcttccctgagcttgagtttataaaatgaaaacaaaccaaaaaaaggaaaaaaaaaaaaaaaaaaaaaaaaaaaaaaagaaggcaaaacacaagcaaaaaaaaaatcctgggcaataaaaattactttaaagcagctctggagcccctctttcctcatcctcctgccgccctgaatgggtaggagacagctgtgtgagggacagacaggagagaggagaggagagcatgctcgcaggtttaacatcagtatattgcaatgctgtcttttctatggtagagaatctttatttgtaaggagtgtctcaggcctagacatacatgaaacttacttttgagattttcatgcgtttggtattttcatgtgttaactgcatgtgaatttttcatgactttctttgtttttctagtttctttttttctaagaagagacttggaacgagtctgattcatggtgttaatagaggcttcttgttttaggaagctttgcttacactctggagcctttacactctgaagaataacttcagagttattccaagtacttgtgtaacttggaaaagtagacttgggttgtgggaacagttgataaagttctggaaagatgccattcactctctttgggtccttacttcctgttgttgcctacagtcttcccaaggtctccttagtctctcccaggcccctgtgactgtcttacgtaagtgtcttctcagttctgtcaaattcctgatgctctatagcactcagaaaattctttgaatggcagactttcttctgtctgtttctaaaatgtgaagctttaggaccaaattgctagtatcaggattgcagattatctcaagtagattttgttagatttcagagcacagcatcactctgagggaatctgtgtcttatatataaataattactgttaatgatgtacactttgctgaagttatagaaccattgtgaatttcaaggctagcaacctacacggtgcaccaggttgacttgaataaatttggcaaccaggtttgccagcatgcagaaactcactcttctctcacataaagggttataaaattggtgtgttatatggaaatggaaaggaaggtagataagacatttctgtcatttttcaagaacatggctgtttatctttaaggcagataatatatccaaaatagttttgtgagttattttctttctggcatttaatgtctacctgatttgagggcaacttctgcccttttcctttcttgctcttaaacctggtgatgcttgatctgccttctcacctattacttcaagtgtttataattgagtttcttaggaagaaagcaaatctggtggcctgttgttttgttgttgtttttcaaattgtcaggactgctgaggctaacctgcagcacagtttgcagcactgacgtgtgagcagagcagaatcactctttaatgctcttataggcggacatcacctctctaaattcagtagcagtttcatcggcagtgccattgaactgtgggaacatttatgattttgtctcaaccttaaaactaaatttagttttgccagtttttgaaagtatcaataaaatcatggaatatgtcccagagcaactgtccatcagtgagcatgtacgatgtcgatttgcggttccaacatacaggatgttcatgctcctacacagattcttgttgagtgaaaacagattgccctatcacaaagcaggattcaacagagttgaaatttaagataaggtttaaaaagctttattcctgtttacaatttgggatgaaaagcaggcttcgttctaagtttattgaaacctggctcagatgtttgtaggtcaagagaaaagcggcacagagacagcacagtgagtcactcaattgcagtaaagagtgaaatggagacagcccgtgagacgaatctcacagtgaagcgtttgttggacctcctggtattaatggagccagagtgacatgcatccttcgtctgtctcttcgtcagcactggcgtcattcctttcagtttaaagaacacatgtaacttgtagctataaacattttgtgccattaaagctctcacaaaacttaaaaaaaaaaaaaaaaa

SEQ ID NO: 861 - DNA, 1618 bp, Homo sapiens
cattgtcttgacagagcatcctcggtggccagcctgcggctcctccatccttctctcctgcctcctccacttgggaggggtcacgctcagctctccgcagcaggatgagccggcaggtggttcgctccagcaaattccgccacgtgtttggacagccagccaaagctgaccagtgctatgaggatgtgcgcgtctcacaaaccacttgggacagtggcttctgcgctgtcaaccccaagttcatggctctgatctgtgaggccagtgggggaggggccttcctggtgctacccctaggcaagactggacgagtagacaagaatgtgcccctggtgtgcggccacactgcccctgtgctagacatcgcctggtgtccacacaatgacaacgtcattgccagtggctctgaggactgcacagttatggtgtgggagatcccggatgggggcctggtgctgcccttgcgggagcctgttgtcaccttggagggccacaccaagcgggttggcatcgtggcctggcaccccacagcccagaatgtactgctcagcgcaggttgtgacaatgtgatcctggtgtgggatgtgggcactggggcagccgtgctgacgctgggcccggatgtgcacccggacacaatctacagtgtggattggagccgggatggtgctctcatctgtacctcctgccgtgacaagcgtgttcgcgtcatcgagcctcgcaaaggcactgttgtggctgagaaggagcgtcctcatgagggaactcggccagtgcatgctgtgtttgtgtcagaagggaagattctaaccacggggttcagtcgcatgagtgagcggcaggtggcgctgtgggacacaaagcacctggaggagccactgtccctgcaggagctggacacaagcagtggagtcctgctacctttttttgaccctgataccaacatcgtctacctctgtggcaagggtgacagctctatccggtattttgagatcacgtctgaggctccgttcctgcattatctttccatgttcagttccaaggagtctcaacgtggtatgggctacatgcccaaacgtggcctggaagtgaataagtgcgagattgccagattctataagcttcatgagcggaaatgtgagcctattgccatgacagtgcctagaaagtcggacctgttccaggaggacctgtatccacccactgccggacccgaccccgccctcacagctgaggagtggctgagcggtcgtgatgctggccccctcctcatttccctcaaggatggctacgtgcccccaaagagcagggagctgagagtcaacaggggcctggacagtgctcgcagaagagctacaccggagcccagtagcactcttagctcggacaccgtgtcacggctggaggaggatgtgaggaatctcaacgccatagtgcaaaagcttcaagagcgcctggacaggctggaggagactgttcaggccaagtagaagactccagagccttcatctggggccagccatttactctgctcccaccccaaccctcaggccatatggtggataagacgaaaataataaaacggctttattttctggtaaaaaaaaaaaaaaaaaaa

SEQ ID NO: 862 - DNA, 1089 bp, Homo sapiens
ggcacgaggggtcgcggtggcagccgtgcggtgcttggctccctaagctatccggtgccatccttgtcgctgcggcgactcgcaacatctgacgccatgaccgagcaaatgacccttcgtgggaccctcaagggccataatggatgggttacacagatcgccaccactccgcagttcccggacatgatcctgtcggcgtctcgagacaagaccatcatcatgtggaagctgaccagggatgagaccaactacggcataccacaacgtgctcttcgaggtcactcccactttgttagcgatgttgtcatctcctctgatggccagtttgccctctcaggctcctgggatggaaccctacgcctctgggatctcacaacgggcactaccacgagacgatttgtcggccacaccaaggatgtgctgagcgtggctttctcctctgacaaccggcagattgtctctgggtcccgagacaagaccattaagttatggaatactctgggtgtctgcaagtacactgtccaggatgagagtcattcagaatgggtgtcttgtgtccgcttctccccgaacagcagcaaccctatcatcgtctcctgcggatgggacaagctggtcaaggtgtggaatctggctaactgcaagctaaagaccaaccacattggccacactggctatctgaacacagtgactgtctctccagatggatccctctgtgcttctggaggcaaggatggccaggctatgctgtgggatctcaatgaaggcaagcacctttacacattagatggtggagacatcatcaatgccttgtgcttcagccccaaccgctactggctctgtgctgccactggccccagtatcaagatctgggacttggagggcaagatcatggtagatgaactgaagcaagaagttatcagcaccagcagcaaggcagagccaccccagtgtacctctttggcttggtctgctgatggccagactctgtttgctggctataccgacaacttggtgcgtgtatggcaggtgactattggtacccgctaaaagtttatgacagactcttagaaataaactggctttctg

SEQ ID NO: 863 - DNA, 876 bp, Homo sapiens
ctcttcctcctccggcacacatcggacctagtagctgctgaaaccatgggcctgggtgtcctgtgtctggcccttgtcctgcttggggtcctgcagaggcaggcccaggactcaactcagaacttgatccctgccccacctctgatcagtgtgcccctgcagccaggcttctggaccgaacggttccagggcaggtggttcgttgtcggcctggcagcgaatgcggtccagaaagaaagacaaagccgctttaccatgtacagcaccatctatgagctacaggaagacaatagctacaacgtcacttccatcctcgtcaggggccagggctgtcgctactggatcagaacattcgttccaagctccaggcctggccagttcaccctggggaatattcacagctaccctcagatacagagctacgatgtgcaagtggccgacactgactacgaccagtttgccatggtatttttccagaagacctctgaaaacaaacagtacttcaaagtcaccctgtacggaagaaccaaggggctgtccgatgaactgaaggagcgattcgtcagctttgccaagtctctgggcctcaaggataacaacatcgttttctctgttcccaccgaccaatgcattgacaactgaacagacggtgagcgtggctgactgggatgtgcagtggcctgatggttcaggtcccacctgtctgtctgccgctccatctttcctgttgccagagaatcacctggctgccccaccagccatgattccaccaagcatctgatccctcttatttgatcagctctccccatccacctgtgttaacgctgccccaccaacgggctccccctttctgctgaataaacacatgtccccaaa

SEQ ID NO: 864 - DNA, 3091 bp, Homo sapiens
gttcgccacgtgtggagagaagggaaaaactgagccgagagaggggggaaaaaaaccaatgctgatttcggaaagaacgaaggaacttcggtagccctggccgaaccaccgacgcaaggaaggtagcgcttccgcagagcggcagcagttctgactggaggggcgctcgctgggagagacccatcacacctaaggggacagctattgctctgggtgacgactcctaaaaagagaatcggtgcctctacctctccacgtagctctgcttcagaacggggattgcttctccagctccccctggaccatgccactgggtggaagaggaacgctgagaggctgagcgaggaaccagctaggtgacaactcagagcccaggagtaccaagtcactgtaaagcataggcaccgtgaggatgactgtggcgagcactgcggctccctcctatacaacctcagacaccaaccgggttatttccaccttttctgttgtggactatgtggtgtttggcctgttgctggttctctcccttgtcattgggctctatcatgcttgccgaggctggggccgccatactgttggtgagctgctgatggcagaccgaaaaatgggctgccttcctgtggcactgtccttgctggccaccttccagtcagccgtggcgatccttgggggaccagctgagatctaccgatttggaacccagtattggttcctggggtgctcctacttcctggggcttctgatccctgctcacatcttcatccctgtcttctaccgcctgcatcttaccagcgcctatgagtacctagagctccgcttcaataaagcagtccggatctgtgggactgtgaccttcatctttcagatggtggtctacatgggagtggctctctatgcaccgtccctggccctcaatgcagtgactggatttgatctatggctgtcagtcctggccctaggaattgtctgcaacatctacactgcactgggtgggctgaaggctgtcatctggacagatgtgttccaaacgttgatcatgttcctagggcagctggtggttatcattgtaggagcggccaaagtgggcggcttggggcatgtatgggctgtggcttcccagcatggcctcatctctgggattgagctggatcctgacccctttgtacgtcatactttctggactttggcctttggcggcgtcttcatgatgctctccttatatggagtgaatcaggctcaggtgcagcgctacctcagttcccactcagagaaggctgctgtgctctcctgctatgcagtgttcccttgccagcaagtggccctctgcatgagctgcctcattggtctggtcatgtttgcctattataagaaatatagtatgagcccccaacaagagcaagcagcccctgaccagttagtcctctattttgtgatggacctcctgaaagacatgccagggctgcccgggctcttcgttgcttgcctcttcagtggatctctcagcaccatatcctccgcattcaattcactggccactgtcacaatggaagacctgatccagccctggttccctcagttgactgaaacccgggccatcatgctctctcgaagccttgcctttgcctatgggctagtttgcctgggaatggcctatgtttcctctcatctgggatcagtgctccaggcagcactcagcatctttggcatggttggagggccactgctgggactcttctgccttgggatgttctttccgtgtgccaaccctcttggtgccattgtaggcctgttgacgggactcaccatggccttctggattggcattgggagcatagtaagcaggatgagttctgctgcagcatcccctccccttaatggatccagctccttcctgcccagcaatctaactgtcgccactgtgaccaccctgatgccttctaccctgtccaagcccacaggactgcagcagttctattccctgtcctatttatggtacagtgcgcacaactccaccacagtcattgcagtgggcctgattgtcagtctgctcactgggggaatgcggggccggtccctgaaccctggcaccatttaccctgtgttgccaaagctccttgcactcctgcccttatcctgccagaagcggctttgctggagaagccacaaccaggatatccctgtggtcaccaacctgtttccagagaagatggggaacggagcgctgcaggacagcagagacaaagagaggatggctgaagatggccttgtccatcagccatgcagccccacctacattgtccaagagacgtccctgtgacctgtgacggacctctcactgcagagcagtggccagagatactctggagtgcagagctgagtcactgcatgagttccgcagcactggggtggatgacctagctcacagcaaaggaccttgatctttaatgtttcaccgccgtgggagctgtcgcatgcaagggacagacagtttttccttatcccttgccagtcttcttttaggatcaggtttgcaaggtacagaatcacagcacacgtggggaaatatactgaggaaagggtggcttttgattaagtgaccagggttctttggggtgaataggaacatttcttacaactccccttgagcaagtttggcaggattgaccagctccagcatttagcatgaagtcctcagccctctggtgattccctcactctcatgtcaacctgggttatctcaagccagtgtgggcctgtggtcttcaggttctctgtaagactcaagtctcctctcattctacctacctctgtttgtgagagggaggctttggagcgcttgggtctcagcacttagtgcatctacttggtgtatagaccctcgctctcttcaggtggtacatgagagacaggtacatgagagaggtcaccaggacctcttatgcagtgtgctatcctctaaactcctaagctaggccaccctggtgtcattctgtcatctgtgcaattcttatttcctttgggagtttcctcctcatgcattttgttcctagggaataaaaatagccattagacctgaaaaaaaaaaaaaaaa

SEQ ID NO: 865 - DNA, 1186 bp, Homo sapiens
gggggctctgcggtgctggtatttagagcgcagcgcctgactggcggggtcgccttcgcatccgccgcttcgagaatcttctttcgtctgctcgctctctctcccgtcgtcctagcccgccgccgcctgctgagcttgccctctccccgcttgcagacatggctgacatcaagaacaaccccgaatattcttcgtttttcggtgtcatgggcgcctcgtccgccatggtcttcagcgccatgggagctgcctatggcacagccaagagtggcactggcatcgcagccatgtcggtcatgaggccagagctgatcatgaagtccatcatcccagtggttatggctgggatcatcgccatctacggcctggtggttgcagtacttatcgctaactccctgactgatggcatcaccctctacaggagttttcttcaactgggtgctggcctgagtgtggggctgagtggcctggctgctggctttgccattggcattgtcggagatgctggtgtccggggcactgcccagcagcctcgactgttcgtgggcatgatcctgatcctcatctttgcggaggtgcttggcctctacggtctcatcgtggccctaatcctctccacaaagtagtctttttccaccaccagtcacaggataggatgtaaagatcacccctcctcattccagaaggaacagcctgacacatgcacgggcagctgccccctcagtagttggtcttgtaaatgtgcagtgtcctagtgcccattgtctgttgccccgccttgcccctactgccccgtgctgtggacatctgggcccactcatctcccacccaggcccctgaccagtgacgatttcagcctctggtcaccccacccatcgccctagagtgcgccttgtgtataagaatgaattagagttgtcatttttctcttcactggatgtttatttataaaagatttgacctattcatgtgtctgtggagcagccctgtctcccaactctatagtaatcattagtagactgttgccttgtggggttcctgttgctgagactccttggatggagccaccctgcccccagccctgaacagccgggggagggtagagagttcctcagagctggctcccagctgtgtccaataaaagttctcggatgtcaaaaaaaaaaaaaaaaaaaaaaaaaaaaaa

SEQ ID NO: 866 - DNA, 4161 bp, Homo sapiens
cgcgaggccgggaaggtgaagttcagacaggtggagtcaacaccatcagtagccaatctggacctgaatcggcacagaggagacctcaagttcttttcatctttttgactccagccatgtccatgatgcccaacctgtgaaggtcccttaccagctagaaacgagatgtccctgctcttttctcgatgcaactccatcgtcaccgtcaagaaggataagcgacacatggctgaggtgaatgcttcccctctcaagcactttgtcactgccaagaaaaagatcaatggcatctttgagcagctgggggcctacatccaagagagtgccggcttccttgaagacacccacaggaatacagaactggacccagttactacagaagagcaggtcctggatgtcaaagggtacctgtccaaggtcaggggaatcagcgaggtgctggccaggcggcacatgaaggtggctttttttggccggacgagcaatgggaagagcaccgtgatcaatgccatgctttgggacaaagttctgccatctgggattggccacaccaccaattgcttcctgcgggttgggggcacggatggccacgaggccttcctcctcacggagggctcagaagagaagaagagtgtcaagaccgtgaaccagctagcccatgccctccatcaggatgagcagctgcatgcaggcagcctggtgagtgtgatgttgcccaactccaagtgtccacttctgaaggatgacctcgtgctgatggacagccctgggatcgatgtcaccacggagctggacagctggattgataagttttgcctggatgctgatgtgtttgtactggtggccaactcagagtccacgctgatgcagacggagaagcagttcttccacaaagtgagtgagcgtctctcccggcccaacatcttcatcttgaacaaccgctgggatgcgtctgccccggagcctgagtacatggaggaggtgcggcggcagcacatggaacgctgcaccagctttctggtggatgagctaggcgtggtggatcgagctcaggccggggaccggatcttctttgtgtctgccaaggaggtgctcagtgccagggtccagaaagcccagggcatgccagaaggaggtggcgctcttgcagaaggttttcaagtgaggatgtttgagtttcagaatttcgagaggcgatttgaggagtgcatttcccagtctgcagtaaagaccaaatttgagcagcacacagtccgggccaagcagattgcagaggccgtccgtctcatcatggattccctgcacattgcggctcaggagcagcgggtttattgtcttgaaatgcgggaagagcggcaagaccggctgagattcatggacaagcagctggagctcctggctcaagactataagctacggattaagcagatgacagaggaagtggaaaggcaggtgaccacagccatggctgaagagatcaggcgcctctctgtgctggttgacgagtaccagatggactttcacccatccccagttgtcctcaaggtttataagaatgaactgcaccgccatatagaggaaggcctgggacgaaacatgtctgaccgctgctccacagccattgccagttcactgcagactatgcagcaagacatgatagacggcttgaagccccttcttcctgtgtctgtgcggaatcagatagacatgctggtccctcgacagtgtttctccctcagctatgacctgaactgtgacaagctgtgcgctgactttcaggaggacatcgaattccatttctcccttggatggactatgctagtgaataggttcctgggccctaagaatagccggcgggccttgctgggctacaatgatcaggttcagcgtcctctccctctgacacctgccaaccccagcatgccacccttgccacagggctccctcacccaggaggagctcatggtctccatggttactggcctggcctctctgacttccaggacctctatgggcattctcgtggtcggaggagtggtgtggaaggcagtgggctggagactcatcgccctctcctttggactgtatggcctcctgtacgtgtatgagcggctgacctggaccaccagagccaaggagagggccttcaagcgccagtttgtggagtatgccagtgagaagctgcagctcattatcagttataccggctctaactgcagccaccaagttcagcaagaattgtctgggacatttgctcatctgtgccagcaagttgacatcacccgggataatctggagcaggaaattgctgccatgaacaagaaagttgaggctctggattcacttcagagcaaagccaaattgctcaggaataaagctggctggttggacagcgaactcaacatgttcatacaccagtacctgcagcccggcagatagtgggcagccagggcggacctgcaccgagaagagacagggccgcacctcccatcagctctagtccttggctgctgcagagagaaggaaagcacccactgtcttgtaccagttactccctaccccctgcaggaagacccccagctcatacccagtggagaccaacaaggactggacagctcagccccaaggagtcatgcatgtgtctgtgtctgctcatcatgctcagtcggttggaagtcactgtgcatttgataaggtcttcctcaggatgccatcctgcagaacgactgatgggcgccttcacaggcatcaggcaggcactcctttcagcccaagtacacctacagagagagaatgttgggggtgactggactccccagaaaagttcagggtactgaagaacttgtgtcttgcatttggccctcagctttagcactttttcccacttgcagagtctttcagttgtgcttggtggccaggctcacacaccctgggctttagactcaaccagcttatagggaaagctggagacccttgccagccagagcaaagtaagagctcaggggacggtatgtgaactagggtgtccgatgtggtagtgaggttggtgtctggcattgtgatgacaagggactcgcctcccttcttgcaagtttgctccaggtggttaaaggatgttgcaggaggaatggtggaagatgggagctgcccgggttagtacagaagaggtctctctatctgacctagcactgagtggctcacaaacctgtaaggctcaccttgctaatttgagctcatccctgccttggtacaagctccctgtggccaccgttctctggactggattgtgccgatgactgcagctggttacaaaacgacaggagaagcctggcggctgttctccttctgccccaaccctcaagcctcctcctcttctgctcctgaagcctcctgctgcttgcctcgcctcatgtcaacgctgaacttcttactgttaagtgttgaaattgttaatggtcaaaacagggaggatttcagtcaccaaggttgattgtcttggaagagcagttttagagtgatgaatcctttgtaggacaggtagatgtagagataaagctctgggctccagcccctcccagaagcccagaaccaggagctctctgtgggacccatgggccatgtcctctcctgcccatgcctgtgtgtcacttcccctcagtctaccctttgtgctgggacagtgctggtcttggccaaggtcagcgtgaatggaaagacatagtgcattgccaggctggacggggtcatctcacagtgggtcattgccaggctggacggggtcatctcacagtgggtcaggacacatcagtgtcgtgtaatcccaatgagtgttatgtgctttttttttggggggggggtagaataaactcaaattctttttctgtatagcccttgagtaatgaatggaattttgagcttatataagtaaagattcatttataccaccagggagagcctgtatctgagagacgtttagcagagagcactttagtttcttgctgctaattgttgtgtgatcctttgctggggtgtagaaggcaccagacacagtgtgtttgcttctggtatatataggtgatgcatctgcctgggttacttgtatctctgccgatagtattggaacctaaaataaagccccagttgtgaccctgaaaaaaaaaa

SEQ ID NO: 867 - DNA, 2527 bp, Homo sapiens
agacggtgcatctgttctgcttaacatcttacagacccatactgcttgtgcttaaacactaactgaactaaaccttcttccctgagacatcatggccctggccccagaattgagcagacagacaaaactgaaagaggtcgcagggatcccactgcgggattcaactgtcgacaactggagtcagattcagaccttcaaggcgaagccagatgacctcctcatctgtacttaccctaaatcagggacaacatggattcaagaaattgtcaacatgattgagcagaatggggatgtagagaagtgccagagaaccatcattcaacaccgacacccttttattgagtgggctcggccaccccagccttcaggtgtggacaaagccaatgcgatgccagctccaaggatactaaggacccatcttcccattcagctgctgccaccgtctttctggacaaacaactgtaagtacctttatgtggctcgaaacgccaaagactgcatggtttccttctaccacttctacagaatgtgccaggtgctccccaatccaggcacctggaatgagtattttgaaaccttcatcaatggaaaagtaagttgtggatcttggtttgaccatgtgaaaggatggtgggaaattcgagacagataccagattctctttctcttctatgaagacatgaagagggacccaaagcgtgaaatccagaaggtaatgcagttcatgggcaagaatttggatgaagaggtcgtggataaaatagtcctggagacatcgtttgagaaaatgaaagacaatcctttgacaaatttttctacaatccccaagactatcatggaccagtccatttcccctttcatgagaaaaggaattgtgggtgattggaaaaaccactttactgtggcccagaatgagaggtttgatgaaatctatgagcaaaagatggacggaacctctctaaacttctgcatggaactctgatcaagatgagaagatagacatcaaggacaggagtctgtctgcaagcctcaatccagccaaaggaagatcagaaagcaaactgtaaatgccaaggactgtgacaccgactctgttattactgacatcactttacaattcacaaaatcatattatgtccagtgtatactttctccactattcagtacaaatcagtaagatggcttaataagctaataaataaacaaacttgaatagtataaattttatgatgacatctttctaggaggtatagcctatattctaactctaaataactatcttatgcacaaaaacaaaatattagaaatcatctaaatgaatgtacagaaattcctaatgtctttctgctcaatcggtatttttcatggttacagtgggaagactcagtttgtagacaacttgttgcaacatgctcactggaacattttctacctggtaggaggaaattgagggaaggacttcaaggagatgtcagaaatccaaatcttaataaacagaatcctagttctggagcataaaagaaacagaagaaaggcatgagggtgacctttggaaagcacaaattgtgtcttgaaaaaagcagaatggatgcttggtgttcaacttgcagccagttgagttttgatctcctgtcatctcttctgaggaacagcttgtacttttgcccactttagcagagtccatctgcatttgcttgccagcatacttccttccacctcccactcgctccatgtcttgggcatccttttactcccagtaaccaggcaatatggagaacacagcatgttgcacgatggctcggaagacggaaaggcaaacacgtttcgggtcacaaattctcagcacttaccctttcactttagttgcagatgtcagcactgctaagctgagatcagcaggagcagcctgtggtatgagcaggatatatatgtgagttcagggtacctagcatgagctagaatgacatttgctttctatcactcaaatgtacactttctcctaaatgttgaggacgtgggcacagcatgtgttactaccagcaagagctatgagaaggtgtagtagaagttagtggatggaagctaagaaactggaacatggcctagaagaaaatgagtgctcctggccctgggtcttcccttcccttgtttcttggccatgaaaaattcaataaaatgaggtggttagttttgctttgccatttaccctcaccatgatattctgtccatctctccacagaatgtaaattccaaacccaagagctaaaataaagcttctgtctttataagttgctttccccagatattgttataatgaaagaaagctcactaatacattcccaatgatgtggttataaaatactagaaaagtctgaaattttgttgaacttatagacaatcgcttggttactgccgaaatctaaccatatgtgtatagttaattaacaatgtctattatattaaaaaattatatcctaattgtattgtaaaaaaaaaaaaaaaaaagcggccgctcgagcatgcatct

SEQ ID NO: 868 - DNA, 2527 bp, Homo sapiens; identical to SEQ ID NO: 867

SEQ ID NO: 869 - DNA, 901 bp, Homo sapiens
gctggccgggtcgaccctggtgtcatccgtttaggaagcggcttcaccgccaacagcacggccatggctggagctctggtgcgcaaagcagcggactatgtccggagcaaggacttccgggactatctcatgagtacgcacttctggggcccagttgccaactggggtctccccattgctgctatcaatgacatgaagaaatctccagagattatcagtgggcggatgactttcgccctctgttgctattctctgacattcatgagatttgcctacaaggtacaaccccgaaactggcttctgtttgcgtgccatgtgacaaacgaagtcgctcagctcattcagggaggacgacttatcaactacgagatgagtaagcggccatctgcctagcagtgcaaggaccagctcttgaaagggacagtgctccagccactgttgcggccacagatcacgtcagcatgaatagtcgtgctgaggggaaaacacggaagactatctttaatgaccatgccaacattattgaatagccaagaatccccaaaccaactctcggctgccttatcaatgctaaactttatttgtcttcatcaggagtagttcaaaatatgcagctaatttaataattttgaatgatgttatctatagcaatctgtagtaatatgtatattatctattgggatttgtgtaataaaaaatctaagggaacaaaactttataactacaagcacttaagtcctcaaaattcttgactttttctttaatgactatagtataaccctcagttggtcacatgtctacacataatttccagtgataacaagtagcggtgttttccatatgtaattcagatctgaacttaatggcaataaatggtttaaatatttgcgaaaaaaaaaaa

SEQ ID NO: 870 - DNA, 1998 bp, Homo sapiens
acgcggggccccaaccccctgcttgttgtccaacttctcacggagcagcgggagagcaagcggcaggactcggctgaggaggccaccatggcagagcttcaggaggtgcagatcactgaggagaagccactgttgccaggacagacgcctgaggctgccaagactcattctgtggagacaccttatggctccgtcacttttaccgtgtatggcacccccaaacccaaacgtccagcgatattcacctaccatgatgtaggactcaactataaatcttgcttccagccactgtttcagttcggggatatgcaagagatcatacagaacttcgtgcgggtccatgtggatgcccctggaatggaagagggggcacctgtgtttcctctggggtaccagtacccatctcaggaccagcttgcagacatgattccttgcatcctgcagtacttaaatttctctacgataattggagttggcgttggagctggagcatacattctgtcacgatacgctctgaaccacccggacaccgttgaaggtcttgttctcatcaacattgatcccaacgccaagggctggatggattgggcagcccacaagttaaccggccttacgtcttccattccggagatgattcttgggcaccttttcagccaggaagagctttctggaaattctgaattgatacagaagtatagaagtctcatcacacacgcgcccaacctggagaacatcgaactgtattggaacagttacaacaaccgccgagacctgaactttgagcgaggtggtgagatgaccctcaagtgccccgtgatgctggtggtaggagaccaagcacctcatgaagatgccgtggtggaatgtaattcaaaactggaccccacacagacctcattcctcaagatggcggactctggaggtcagccgcagctgactcagccaggcaagctgacagaagctttcaagtacttcgtgcaaggcatgggctacatggcctcatcctgtatgactcgcctgtctcggtctcgcacagcatctctgaccagtgcggcatccatcgatggcagtcggtcccgatcccgcaccctgtcgcagagtagcgagtctgggactctcccttctggacccccggggcacaccatggaagtctcctgttgagcgaccctctttgccttggtgtggaacccagccctcacctcccgcagcactaacttaagaggtgttttcagggcaatgggccagagtcagcaaggaaaatgggcagattgtgcagggagatgatgaccttgatctttaattgctaccctaaccttgacctttaacctgtgatatcctctagctcctcggtgaggtgtcctaatatctcttagagatccaggccccctaagtcatctcctcctcccgttttggtcttgagaaggcttttatgttccctctctgacctgggttctatagatgaggaacaataagttgttttagctgtcacggggatgccatcactccccctctttagcccatatttgcaagggtaggagagtgtgtgtatgtgtagggttggtggtgggatatgaggagctccattcccccaaagctgaaacagtgccttgacgtttaaggcctctgaaggcaatgctcctaaatggatgtctctcaggggaatatttgctggtgtgttactgatccttaacgtgatagacatatccagcatgtaaaaagaaagtcagaacgggagatggtggccagtgaagaacaatggtaaacacattgaagcaggggcattagggaggggcccgggtcctttggccgcactaactttaatagctgtcagtgtgcacctaaagtgggactgggggaaagaacttaggtccgactgcttggggtttggcatcagggtgggaagggctacctcagactctgaccatactcttgtgtgtagggtgtgacctcctgtctcacacaacttctgctgtgacaataaaagatagaggaaactga

SEQ ID NO: 871 - DNA, 1902 bp, Homo sapiens
tagcccgacgaactgagaactggccatggcacggaaacaaccacatagctggctgaatgctgtgctctttgggctcctgcttattcttatccatgtgtggggtcaggactcaccagagtccagctccatcaggaccacacacacgggccaggtccgaggaaagcttgaccacgtgagggacactaaagctggtgtccacaccttcctgggaattccctttgccaaggctcctgtaggaccgctgcgctttgcacctcctgaggaccctgagccatggagtggtgtgagagatgggacctcacatccggccatgtgtctgcaaaatattgatatgctggatgaagtaggcctgacagatatgaaaatgatactgtcttccattcctatgtctgaggactgcctgtatctcaacatctatacaccagcccatgcccatgagggctctaacctgcctgtgatggtgtgcatccacggaggtgcactggttataggaatggcttccatgtgtgatggatctctattggcagtcaatgaggacttggtggttgtcgctatccagtatcgtctgggtgtcctgggctttttcagcactggagatgagcatgccagaggcaactggggatacctggaccaagtggctgccctgcgatgggtccagcagaatatcgcccattttggaggcaaccctaaccgggtcactatttttggcgtgtctgcaggtggcacaagtgtgtcttcacatgttatatcccccatgtctcaagggctcttccatggtgccatcatggagagtggagtggccctgctgcctgaccttatctctgaaacctctgagacggtctccactacagtggccaagctctctggatgtgaggccacggactcagagaccctggtgcgctgcctgagagccaagagtggagcagagattctggtcattaacaaggtcttcaagatgattcccgctgtggtggatggagagttcctacccaggcatcccaaagagctgttggcatctgaggattttcgccctgtccccagcatcattggtgttaacactgatgagtactgttgcaccattcctatggtcatgggcactgctcaaataataaaggagctatccagagagaacctgcaggctgttctaaaggatacagcagcacaaatgatgcttcctcctgagtgtggtgacctgctaatggaagagtacatggggaatactgatgatccccagaccctacaaatacagtacgctgagatgatgggagacttcctgtttgtgatccctgcactccaagttgcacactttcaacgttcccatgcccctgtctacttctatgagttccaacatgcacccagctatttcaagaatgtcaggccaccccacgtgaaggctgaccatgctgatgaggttccttttgtctttgggtccttcttctggggcataaaagttgacttcactgaggaggagaagctgctgagtaggcggatgatgaagtactgggccaattttgcaagacacgggaaccccaacagcgagggtctaccctactggcctgtgttggaccacgacgagcagtacctgcagttggacacccagcctgctgtggaccgagccctgaaggccagaaggctgcagttctggaccaagactctgccccagaagatccaggagctaaatggagctcagaaaaaccatgcagagctgtagtgtctggtgaaaggaacagagtgtgggagtgagggcaggtgggatcattctgagtttcaaagtctaattttctgttccaacacgcagaatcctttccaaccccaatattttccctttctgacatgaatgagaagccctccgtgtgttactctttattcttctgggcaaaatttaattggactcaataaaga

SEQ ID NO: 872 - DNA, 3097 bp, Homo sapiens
ggtgcaggataccttgagaaaatggctgagtatctgaggctgccccactccctggcgatgatccgcctctgcaacccgccagtcaacgccgtcagtccaactgtaatcagggaagtaagaaatggactccagaaagctggatcagaccacacggttaaagccattgtgatctgtggcgcaaacggaaacttctgtgcaggtgctgatatccatggctttagtgcttttacccctggccttgcattaggaagcttggtagatgaaatacagagataccagaagccggtgttggccgctatccaaggtgtggctctcggaggaggactggagctggccttgggctgtcactatcggattgccaatgcaaaggctcgtgtcggcttgccagaagtcacactggggattcttcctggtgcaagaggaacccagcttctccccagggtcgttggagttcctgttgctcttgacctaattacctcaggaaaatatctttcagcagatgaagcactcaggcttggaattctggatgcagtcgtgaagtcagacccagttgaagaagccatcaaatttgctcagaagattatagataaacccatagaaccccgcaggatctttaacaagccagttccaagcttgcccaacatggacagtgtttttgcagaagccatcgccaaggtacgaaaacagtaccctggtgtcctggctccggagacgtgtgtccgctcaatccaggcctctgtgaagcatccctacgaagtaggcatcaaggaagaggaaaagctgtttatgtacctccgggcatccgggcaggctaaagccctacagtatgccttctttgctgaaaagtctgcaaataagtggtcaactccctcaggagcgtcttggaaaacagcctctgctcaacccgtctcctcagttggcgttcttggcttgggaacgatgggccgaggcatcgccatttcttttgcgagagtggggatctctgtggttgctgtggagtcagacccaaagcagctagatgctgcaaagaagataatcactttcaccttggagaaggaagcatccagagcgcatcagaacggccaagcttcggcaaaaccaaaactcaggttctcctcatccacaaaggaactttcaactgtggatttggtggttgaagcagtgttcgaagacatgaacctgaagaaaaaggtctttgctgagctgtcagccctgtgcaagccaggagcctttctgtgcaccaatacctcggcgctgaacgtggacgacattgcttcttccacagatcgccctcagctggtgattggcacccacttcttctcaccagcccatgtcatgaggttgctagaggtcattcctagccgatactcttcccctactaccatcgccacggttatgagcttgtccaaaaagatcggaaagattggagtagtggttggcaactgctatggatttgttgggaatcggatgttggctccctattacaaccaggggtttttcttgttagaggaaggtagcaagccagaggatgtagacggggtcttggaagagtttggttttaaaatgggacccttcagagtgtcagacctcgcagggctagatgtgggttggaaaattcgcaaggggcaaggccttactggaccatcattgccaccagggacccccgtccgaaagaggggcaacagcaggtactccccacttggcgatatgctctgtgaagctgggcggtttggtcagaagacaggtaaaggctggtatcagtatgacaagccactgggtcgcatccacaaacctgatccctggctttctacgttcctgtcacaatatagagaggttcaccacatcgagcagcgcaccatcagcaaggaggagatcctggagcgttgcttatattccctcatcaatgaggcgttccgcatcttggaggaggggatggctgctcgcccagagcacattgatgtcatctacttgcacgggtacgggtggccaaggcacaagggcgggcccatgttctatgctgcctcagttgggttgcccacagttctagagaaactgcagaaatattacaggcagaaccctgacatcccccagctggagcccagtgactacctcagaaggctggtagcccagggaagccctcctctgaaggaatggcaaagcttggcagggccccacggcagcaaactgtgattcagccttctgcgttttgccacgtatgttggcacctaatttcagtatgattccttcctaaaatccaaacagatcgctctgaagtacaaatcatgattgctgctgctgctgctgctgatagctggtcagtaaaagctcctctccgtatctttctacctcataattccaatggtcagacttcaggaatgtctacagttagtctatacctctgactgcacttctatcggaaaaattcaacgaatgtatgtttactactacaagcattcttctcttttgactgtttgcccactctaacaaaaacgtatacaaaatgttgctaatagaataattcacacctccagttgacaacccaaatggccttagcagatcaacacaggtggcatatacacgcacttgacacattccagctgtgtgaagttactgccacctgttgtaacatggtgctgggttagagcactgttctgagtgaggggaggcaggcagagaaggcaggcagataaggccacacatcatatggatgtggatataaaattccaggatatgcaggtctgtggacaacatagatgagtagcccaaggctgtaactgttcatacatgcatatattttttggtccttttttttttcggagctggggaccgaacccagggccttgcgcttcctaggtaagcgctctaaccactgagctaaatccccagccccgaggctgtaactgttagaggttaaaaatcactactgattagtacagagtatctttgggagctgataaaattttctaaaattactctagtggtggatctgtaacacattgagttcaatggttcaaagtgaattatattttatatatatatatatatatatatatatatacatatatatatagtctatctcaataaagttaataaaatt

SEQ ID NO: 873 - DNA, 1610 bp, Homo sapiens
cagcgtggggagcgctgggagcggctacggcgtgcggggagctgaggtaaagccggggctagtacggtaccaggcggtgcacgagctggctaagcaagatttgtaaaaatggagtttcaagccgtagttatggccgtcggtgggggatctcggatgacagacttgacttccagcattcccaagcctctgcttccagttggaaacaaacctttaatttggtacccgctgaacctgcttgagcgagttggatttgaagaagtcatcgtggttacaaccaaagatgtccaaaaggctctgtgtgcagagttcaagatgaaattgaagccagatattgtgtgcattcctgatgaggcagacatggggactgcagattctctacgccacatatatccaaaacttaagactgatgtgctggtcctgggctgcgatctgataacagatgttgccttacacgaggttgtggacctgttcagagcttacgatgcatcacttgccatgttaatgaggaaaggacaagagagcacagaaccagttccaggtcagaaggggaaaaaaaaaacagtggagcagcgtgacttcattggagtggacagcacaggaaaaaggctgctctttatggctaatgaagcagacttggatgaagagctggtcattaagggatccatcctgcagaagcaccctaggatacatttccagacaggccttgtggatgctcatctctactgcttgaagaaatatgttgtggatttcttaatggaaaataagtcaatcacttctatccgaagcgaactgattccatacctagtaagaaaacagttttcctcagcctcctcacagcaaaggcaggaagacaaagaagaggatctaaagaaaaaggagcccaagtctttagatatttacagttttataaaaaaagacaacactctgactttggctccctatgatgcctgctggaatgcttttcgaagagacaagtgggaagatttgtctagatcacaggttcgctgctatgtccacatcatgaaggaaggactttgctctcgagtaagcacactgggactctacatggaagccaacagacaggtacccaaattgctgtctgttctttgtcctgaggaatcaatgatccatccatcagcccagattgccaacaaacacctgattggagccgacagccttatcgggtcagatacacaagttggagagaagtcatctattaaacgatctgtcattggctcatcctgtgtcatcagagacagagtaactgttaccaactgccttctcatgaactctgtcaccgtggaagaagggagcagcatccatggcagcgtcatctgcaacaacgccgtggtcgaggcgggcgcggagatcagggactgtttaattggaagtggtcagaggattgaagccaaagctaaacgcatgaacgaggtgatcgtgggaaatgaccagctcatggagatctgaatcctgaacaagtctgaccccttccttttggccccaaaactacagatgttggctggcccacctgtttgactctgtatttatttttcaataaagaagaatttccaggctgtaaaaaaaaaaaaaaaaaaaaaaaaaaaaaaaaa

SEQ ID NO: 874 - DNA, 1610 bp, Homo sapiens; identical to SEQ ID NO: 873

SEQ ID NO: 875 - DNA, 1610 bp, Homo sapiens; identical to SEQ ID NO: 873

SEQ ID NO: 876 - DNA, 1622 bp, Homo sapiens
caaatatttactgaaggcttcagactgcaaaacgtatgcttacttctttgctctgaatgatcttctctacaccagaggtccggaactggatgaagggaagtggcccctggcctccacagctgaccacatgagggtggtttctagcctctttcttcctgtgctccttgcagaggtgtggctggtgagcagtttcaatctcagctcccattcaccagaggctcccattcgcctggtgtctcaggattacgagaatcaaacttgggaagagtacgaatgggctgatcccagggatgataatgaatactggctaagggccagccagcaactctccaatgagacttcaagctttgggttcagcctgcttcgaaagatctccatgaggcacgatggcaatgtgatcttctcaccatttggcctgtctgtggctatggtgaacttgatgctgggggccaagggagagaccaaagtgcaggtagaaaatgggctcaacctacaggccctgagccaggcaggacccctgatccttccagccctcttcaagagagtcaaagagaccttttccagcaacaagaaattgggcctcacccagggtagctttgccttcatccacaaggactttgaaattaaaaagacctatttcaatctatccacaatgtattttgatacagagtacgtgcctacaaattttcgaaattcttcacaagccagagggctcatgaaccattacattaacaaagagactgaggggaaaatccccaagctttttgatgagattaatcctgaaacaaagttaattctggtggactacatcttgttcaaaggcaagtggctgactccatttgaccccatcttcactgaggctgacactttccacctggacaaatacaaggcagttaaggtgcccatgatgtaccgggaagggaactttgcctctacctttgataagaagttccgttgtcacatcctcaaactgccctaccaaggaaatgccaccatgctagtggtccttatggagaaatcgggtgaccacttggccctggaggactacttgaccacagacctcgtggagatgtggctccaggatatgaaaaccagaaaaatggaggtcttctttcccaagttcaagctgaaccagaggtatgagatgcatgagctgctcaagcaggtgggaattaggaggatcttctccacctcagctgacctcagcgaactctcagccgtggcacgaaatcttcaggtgtccaaggtcgtacaacagtcagtgcttgaggtggatgaaaggggaactgaggtggtgtcagggacggtgtcagagatcaccgcttactgcatgcctcctgtcatcaaagtggaccggccttttcacttcatcatctacgaggagatgtcccagatgctcctatttcttggcagggtggtgaacccgacagttctgtgactcgggcatgtaggacctcggccaccacaggtgctgagccagaggtgtctgaatcacaagacgctgttggtagacggtaaaggatgcattctctgtacccagccagtttgctatggctgttgtctgattaacactgaaattaaaatgactcatactttaaaaaaaaaaaaaaaaaaaaaaaaaa

SEQ ID NO: 877 - DNA, 2028 bp, Homo sapiens
ggcagcgaacacaagcgcatccggtagaacggaaagaacaggaattgcagagtgacttcaagtctccatacgatttactacccgggtgacggcagtgactcgacagagtagcggctgcaggtgggatggataacagggtctcgggaacgaccagtaatggagagacaaagccagtgtgtccagtcatggagaaggtggaggaagacggtaccttggaacgggagcaatggaccaacaagatggagttcgtactgtcagtggcgggagagatcattggcttaggcaacgtctggaggtttccctatctctgctacaagaacgggggaggtgccttctttattccctacctcatcttcctatttacctgtggcattcctgtcttcttcctggagacagcgcttggccagtacaccaaccagggaggcatcacagcctggaggaaaatctgtcccatcttcgagggcatcggctatgcctcacagatgatcgtcagccttctcaatgtctactacatcgttgtcctggcctgggccctcttctacctcttcagcagcttcaccactgacctcccctggggtagctgcagccacgagtggaatacagaaaactgtgtggagttccagaaaaccaacaattccctgaatgtgacttctgagaatgccacatcccctgtcatcgagttctgggagaggcgagtcctgaagatctcagatggcatccagcacctggggtccctgcgctgggagctggtcctgtgcctcctgcttgcctggatcatctgctatttctgcatctggaaaggggtcaagtccacaggcaaggtggtgtacttcacagctactttcccttacctcatgctggtggtcctgttgatccgaggagtaacactgcctggagcagcccagggaattcagttttacctgtaccccaacatcacacgtctgtgggatccccaggtgtggatggatgcgggcacccagatcttcttctcctttgccatctgcctggggtgcctcacggccctgggcagctacaacaagtaccacaacaactgctacagggactgcgtcgccctttgcattctcaacagcagcaccagcttcgtggccgggtttgccatcttctccatcctgggcttcatgtctcaggagcagggcgtacccatatctgaggttgctgaatcaggccctggcctggcattcatcgcctaccctcgagctgtggtgatgttacctttctcgcctttgtgggcctgctgtttcttcttcatggtggttctcctgggactagacagccagtttgtgtgtgtagaaagcctcgtgacagcgctggtggacatgtatccccgggtgttccgtaagaagaaccggagggagattctcatcctcatcgtgtctgtcgtctctttcttcatcgggctcattatgctcacagagggcggcatgtacgtgttccagctcttcgactactatgcggccagtggcatgtgtcttctctttgtggccatctttgagtccctctgtgtggcttgggtttacggagccagccgcttctatgacaacattgaagatatgattgggtacaagccgtggcctcttatcaaatactgttggctctttttcacgccagctgtgtgcctggcaaccttcctgttctccctgatcaaatacacgccactgacctacaacaagaagtacacatatccatggtggggggatgccctggggtggctcctagctctgtcctccatggtctgcattcctgcctggagcatctacaagctcaggactctcaagggcccactcagagagagacttcgccagctcgtgtgcccggctgaagaccttccccagaagagccaaccagagctgacttctccagcgacaccgatgacgtccctcctcaggctcacagaactggagtctaactgctagggacgaggcctttgacacacctgcgagtctgtctgtggggacagctacagacacagagggcagaaccacccctccgtgctggggcagagagaca

SEQ ID NO: 878 - DNA, 2231 bp, Homo sapiens
gcttattatttgttctgaggaagctctctgtgtggatacagatttataggtattagaagagatgttctatatacagagttctgaggcactgcagattctgaagaattccctaaggaagcacctccctgagtccttaaaggtttatgggactgtcttccacatgaaccagggaaacccattcaagctcaaggctgtggtggacaagtggcctgattttaatactgttgttattcgaccacaggaacaggacatgacagatgaccttgaccactacaacaacacttacctaatttattccaaggatcccaagcactgtcaggaattccttggctcatcagacgtcattaactggaaacaacatttgcagatccaaagttcacagtcagacctgggcaaagtgatagaaaaccttggagccactaacttgggcaaggtcaagcataagcagtgctttctctatatggtatctcatacagcaaagaaactgactccttccttggtggatgcaaagcacttagtagtcagcagtgagaaacccacaccttttgaccatcagttattcaaatttgcccgcctggatgttaagcatgctgcattggtgaatagcatctggtattttggtggcaatgagaaaagccagaagttcattgaacgctgtatctttacctttcccagcgtctgtattatgggccctgaggggacccctgtgtcctgggccctgatggatcacactggagaactaagaatggcaggcaccttgcctaagtaccggcaccagaacctcatttaccatgttgcttttcaccaggtccatacactagagaagctgggctttcccatgtatttacatgtggataaggttaacctcaccattcagagaatgtctgctgtgctggggcatgtccccatgccctgtacctggaaccagtggaactgggtacctctctaaagccagaaaagagtgagagggggactgcacttgtagatggagaaatggctgagtgaacagagagaagtgaactgtcattagggtggtgtgtgtttctagagagcagggttgcatcacactgagctgcacacagtttcttcgccctcacattgctcatgctcttaattccatttctcagcatacagaaggccaccatgtcctgctcccacattctcaggattcctgtaacacatttggctaaattgtactctctcctattcattttgcaggctcattgatccatggctattagtcagtaggtttgttttgtgacctgaccccccacaaccctgcacacaggcatacttcctctggctttctgtagctttgcttttatgggttggagaagtttgttctcatgtcactcaccagacattaaattgttaatatgtaaaaactactatacatgcaaacacagatacacagtatgtgtggtacaactgtaagaattgttagaaaagagactagagctcagcaagtaaatgtgcctgcagtcaagcctggtaacctgaatttgattcctgggaaccacattgtaaaaggagagaatctattccatcgacttgtcctctaacctccccaggtatggggcgcatgtgcacacacaaataagtaaatgtaatctttaaacagttaaaaagactaactggtgatctttgagactagatttgtattttttttttcaatgaacattcactattacttcccgtgccaggaaggaacacttagcattgttctaaaggctgagcttcattacttcagtctaacgtttatatgtcataaattctttatttatggaagcttaagctctagaaagcaaagaactgtgtggagaagagaaaataacaacattaaaaacaggaaaaacggatgtctgttatgtaggagaaaggaagaagttgggatgaggaaggaggatgggaagcagaactggggtgctgaagggagaggaaaggagggtagtagagaggaggagagaagagggaaggggggggaatgggaaaagaggggaggggagagtgatatcttaggttatagagagatcagctcttctgtagagaggataaataatgtggtcgcattcatagctgagttgagcagaaagtgatcagattaaaagagaatgaaggggggctggggatttagctcagtggtagagcgcttacctaggaagcgcaaggccctgggttcggtccccagctccgaaaaaaaagaaaaaaaaaaaaaaaaaaaaaaaaaaaaa

SEQ ID NO: 879 - DNA, 1995 bp, Homo sapiens
agcagcctgagcggcggcgacggcggcggcagcggcagagaccgccgtggcgccgggagctgaaacccgaagggaacgcggggcgacggcgacggcggcgacccggtgacagcgcgagaggtactaagtgtaacaagtgtgcatcatgcgtgaatataagctagtcgttcttggctcaggaggtgttgggaagtcggctctgactgtacagtttgttcaaggaatttttgttgaaaaatatgatcctacgatagaagattcttatagaaagcaagttgaagtagatgcacagcagtgtatgcttgaaatcctggatactgcaggaacggagcagtttacagccatgagagatctgtacatgaagaacggacaaggctttgcgttggtttactccatcacagcacagtcgacatttaatgacttacaggatctaagagagcagattcttcgggttaaagacactgacgatgtcccaatgattctggttggtaacaaatgcgacctggaagacgaaagagttgtcgggaaggaacaaggtcagaacctggcaagacagtggagcaactgcgctttcttagagtcctccgccaagtccaagataaatgttaacgagatcttttatgacctagtgcggcaaattaacagaaaaaccccagtgcctgggaaggcccgcaaaaagtcatcatgtcagctgctttaatgtactgaatgcattgtagctctgagccaggtctgaagaactgttgcccaattcagcagtgccagcattccaactttgttaaacctaccaacatcttaaatggactttcccgtggtggtaccctgtaagaggcggacgaaagctactctatcagtttgcacattctaatcactttccagtatcacgagaggttttgacttatatgatagttctagagtatgcagctggtaaaaccagaggctacatccagtattactgctaagagacattcttcatccaccaatgttgtacatgtatgaaaatggtgtactgtatactttaacacacccatactttgtattggagagtacaataatgtaaatcctaaaagcaccactattttagcataataaaagaaagtccaaagagctcctatatagactactccagataactttgcttctttgatacttgtagcttactgtaattttttttaaattcaaggtcattatcattgtattatacaaaataagcgctttgattaacacagctatatagtttttttaatttttcaaaaacctgtggagacagtgatcttgtctttaaaatatgatagtcctttcagtataatgtcttagattaaagacgttgcctttaatatctgttgggaaggaaatgtccagacttttcaaatctccttattattatgtttccttttttgtttacatagggaacaatgtttatagttgtgtgtacagtgggggtctacaacaagaagtgtatattttcaaacagttttttaatgatttaacaactttgtaaatcattttcaggcttctgcagctgtagattctcactgtgcctcccttgcttgctcgtgcacacgtgtgtctgcaataccaaatacacaggtttagtatcttcgcctgttagtgactgtttccatgtgtaacgttttggttgagatgttaaatggtggacgagtactgtggatgtgaatgtgggaagtaattttaatcatgtgtaattggtcacaaggctaatctgcagtaactcttgctgttctatttaacaatgccttgttgctttgtatgcattaacgtttgggtgtaaagattgtgtgtccatccaacagggagccacagtatttaaattgaccaacctgatgttacaactttgaggtggccaaatgtaaactaaaagccttaattaaagtggtgcaattttgtataacttagcatccgtagttcaataaatttggattgccgtgcaagggcttgcattataaaaaaaaaaaaaaaaaaaaaaaaaaaaaa

SEQ ID NO: 880 - DNA, 900 bp, Homo sapiens
atggaacatttcgatgcgtcactcagtacctatttcagggcattactgggcccccgagacacacgagtcaaaggatggtttcttctggacaattacatccctacgtttgtctgctctgccatttatttactcatcgtgtggctgggaccaaaatacatgaaaaacaggcagccgttctcttgccgaggcatcctggtggtgtataatcttgggctcaccctgctgtctctctacatgttctatgagttggtgacaggtgtgtgggaaggcaaatacaacttcttctgtcagggaacacgcagcgcaggagaatcagatatgaaggttattcgtgtcctctggtggtactacttttccaaactcatagaattcatggacacctttttcttcattcttcgtaagaacaaccaccagatcacagtcctgcacgtctaccaccatgccactatgctcaacatctggtggtttgtcatgaactgggttccctgcggccattcgtacttcggtgcgacgctcaacagcttcatccacgtcctcatgtactcgtactatggcctgtcctctgtcccttccatgcgtccctacctctggtggaaaaagtacatcactcaggggcagctggtccagtttgtgctgacaatcatccagaccagctgcggggtcatctggccgtgctccttccctctcgggtggctgtacttccagatcggatacatgatttccctgattgctctcttcacaaacttctacattcagacttacaacaagaaaggggcctctcggaggaaagagcacctgaagggccaccagaacgggtctatgactgccgtcaatggacacaccaacaactttgcttccctggagaacagtgtgacgtcaaggaagcagcggaaggattga

SEQ ID NO: 881 - DNA, 1272 bp, Homo sapiens
cgctgctgtacgctgcgcgtggcgctctgggccttcggtcgcgcgtcctctcgccatgtcccggtctccggcaccccgcgccgtctctggcgcccctctccggcccggtacggtgctgggcaccatggagatggggcgccgcatggatgcgagtgctagcgctgcgaccgtacgcgccttcctggagcgcggcctcaacgagctggacacggccttcatgtattgcgacggccagtccgaaagcatcctgggcagcctggggctcgggctgggcagcggcgactgcacagtgaaaattgccaccaaggccaacccttgggacgggaagtcgctgaagcctgacagtgtccggtcccaattagagacgtcattgaagcggctgcagtgtccccgggtggacctcttctacttacacgctcctgaccacggcactcctatcgtggagaccctgcaggcctgccaacagctgcatcaggagggcaagtttgtggagcttggcttgtccaactatgcctcctgggaggtagccgagatctataccctctgtaaaagcaacggctggatcctgccaactgtgtaccagggcatgtacaacgccaccacccggcaggtggagactgagctcctcccctgcctcagatacttcggactgaggttctatgcctacaaccctttggctggaggcctgctgactggcaaatacagatatgaagacaaggatgggaaacagcccgagggccgcttctttgggaatagctggtctgagacctacaggaaccgcttctggaaggaacaccactttgaggccattgccctggtagaaaaggccctgaagaccacctatggcaccagtgcccccagcatgacctcggctgccctgcgctggatgtaccatcactcacagctccagggcacccgaggggacgcagtcatcttgggcatgtccagcctggagcagctggagcagaacttggcggccactgaggaaggtcccctggagcccgctgtcgtggaggcctttaaccaagcctggaacgtggtcgcccacgagtgtcccaactacttcagatagactgtcgtgactcaagacgccagggcttttctgccaactcttagagtcacaccctggccactccttgcccagtgctgacctagtgtggtcttttctgctggtctccatccactccctgctcttttcccgtctgaataaagcaggcgtccgacctagctgcagcccggactgaaaaaaaaaaaaaaaaaaaaaaaaaaaaa

SEQ ID NO: 882 - DNA, 1272 bp, Homo sapiens; identical to SEQ ID NO: 881

SEQ ID NO: 883 - DNA, 1330 bp, Homo sapiens
gggttagtttaacatgggttcctccagctccaccgctctggctcgccttggactccccgggcagccgcggtccacctggctcggcgtcgccgcgctgggactggccgcagtggcgctggggaccgtggcctggcgtcgcgcgcgtccccggcggcgccggcagctgcagcaagtgggcacggtgtcgaaggtttggatctacccgatcaagtcctgcaagggggtgtcggtgtgcgagactgagtgcaccgacatggggctgcgctgcggcaaagtgcgcgacaggttttggatggtggttaaggaagatggtcacatgatcactgcccgccaggagcctcgccttgtgctggtcaccatcaccttggagaacaattacctgatgctcgaagctccaggcatggagccgatagttctgcctatcaagctgccctcttcgaataagatccacgactgcaggttgtttggcctcgacattaaaggcagggattgtggcgatgaggtggcccggtggttcaccagctacctaaagacgcaagcctacaggttggttcagtttgataccaaaatgaaaggaaggacaacaaagaaactctacccgtcggagagctaccttcagaactatgaggtcgcctacccagactgcagccctatccacctgatttctgaagcctccttagtggatctcaacaccaggctgcagaagaaagtgaagatggagtatttcaggccgaacatcgtggtgtcaggctgcgaggctttcgaggaggacacctgggatgagctcttgattggtgacgtagagatgaagagggtgttgagctgccccaggtgcgtgttgactacagtggacccagacaccggcatcatagacaggaaagagccgctggagaccctgaagagctatcgcctgtgtgatccttctgtgaagagtttataccagtcgtctccactctttgggatgtatttctcagtggaaaaaattggaagcctgagagtgggtgaccctgtgtatcggatggtggattagtggatcccgtggactgactcggtttggattattcacaactgacagtctgagtaacagagtgatggggaatcttgtcatttactcggcttccctgggagacgacgcatctgcaagtcctcacggccatcttcctggaaatggatctctgttcttcctctggagctgcacatgcccgagttcattcaagaaagctaccagaggtggtttgggaatgtgacggtgtataaattttagataatgaggttttaaaaaattaaacggaattgttactcccacggttaaaaaaaaaaaaaaaaaaaa

SEQ ID NO: 884 - DNA, 1958 bp, Homo sapiens; identical to SEQ ID NO: 385

SEQ ID NO: 885 - DNA, 1049 bp, Homo sapiens
gccttcggttttagggagagcaggccgggcggtcagagatcatgggggagagcgcactggagcccgggcctgtgcccggggcgccggctgggggtccggtgcacgccgtcaccgtggtgactttgctggagaagctggccaccatgctagaggcgctgcgggagaggcaggggggcctggctgagaggcagggcggcctggcgggctcggtgcgccgcatccagagtggcctgggcgcgctgagtcgcagccacgacaccaccagcaacacactggcgcagctgctggccaaggcggagcgcgtgggctcccacgccgacgcagcccaggagcgggcagtgcaccgcgccgctcaggtgcagcgactggaggccaaccacgggttgctggtggcgcgcgggaagctgcacgtcctgctcttcaaggaggagactgaaattccagcccgcgccttccagaaagcaccagagctcttgggcccggaggaccagttggtgctaggcccagagcagccagaggatgaagttggagagagttctgatgaggaacccgtggagtcccgggctcagcggctgcgacgcactggcttacagaaggttcaaagcctgaaaagggctttttccagtcgtaaaggctctgaagcagcacagcccacgccagtcaagccgccacgcctaggtcctgtccggaactccgaaggcccggcagaaggccagcctgcagctcagcctgcaatggagcctgtgctcccgtctgccctggagccagaacctcctcagcctaccaaggaagatcctgagagacctgtgcttcaaatagagagcgcagcctgatccctggggctgcctgccccattcagcccttatgccttgtcccaaaaataaatactaatcgagtgcagcacttacatccaaataaggagagaatcctgcatccactgcccggctccaatccttccttcctggttttccagtctggtaccctgtgtcctctgaaagaggaacattcggccttgtttaggttcaccaccaataaaagtaattttctct

SEQ ID NO: 886 - DNA, 1049 bp, Homo sapiens; identical to SEQ ID NO: 885

SEQ ID NO: 887 - DNA, 1215 bp, Homo sapiens
ggcacgagagaaagcgactcttctagggaagagcagcatctgagaatgaattccaaaattcagaagatggagttaaacgatggtcactccatccctgtactgggctttggcacctatgcaaccgaagagaatctcagaaaaaagtctatggagtccacgaaaatagctatagatgttgggttccgccatattgattgttctcacttgtaccagaatgaagaagagataggtcaggccattgtaagcaagattgaagatggcactgtgaaaagggaagatatattctatacttcaaagctttggtcaacttcccatcgtccagagttggtcagacccagcttggaaaattcactgaggaaacttaatttggactatgtagacctctatctcattcatttcccggtatctctgaagccaggggatgagcttttacctcaagatgagcatggaaacttaatacttgacacagtggatctctgcgacacctgggaggccatggagaagtgtaaggatgcaggattggccaagtccatcggggtgtccaactttaaccgcaggcagctggagaagatcctgaataagccggggctcaagcacaggcctgtgtgcaaccaggtagaatgccatctttatctcaaccagagcaagctgctcgcttactgcaagatgaatgacatcgttctggttgcctatggtgccctgggaactcagagatacaaatactgtattaatgaagataccccagttctcttggatgatcccattctttgtaccatggcaaagaagtacaagcggactccagccctgattgcccttcgctaccagctggagcgtgggattgtgaccctagtcaagagtttcaatgaggagagaatcagagagaacctgcaggtctttgatttccagttggcttcagatgacatggaaattttagataacctggacagaaatcttcggtactttcctgctaatatgtttaaggctcaccctaactttccattctctgatgaatactaagatggcagccctagccatgagttctgctcgaagctcctttgtgtgatgctcgactctcagaggccaataatacaacacactgactccaatccatactgcttagcaactcacccccagtttgagctgtgtctgtacatcggggagcaaattcactaaattttcctgcttttctgtaaataaataaaaatattttgcttc

SEQ ID NO: 888 - DNA, 1215 bp, Homo sapiens; identical to SEQ ID NO: 887

SEQ ID NO: 889 - DNA, 1721 bp, Homo sapiens
gaagggtctccatggatccagttgtggtcttgttgctcagtctgttctttctgcttttcctgtctctatggagactgagctctgggagagggaaactccctcctggcccaactcctctcccaattattggaaatttctttcaggttgatatgaaggacattcggcaatccttaaccaatttttctaaaacctatggacctgtgtatactctgtatgttggctcacagcctactgtggtattgcatggctatgaggcattgaaagaagctcttgttgatcatggggaagaattctctggaagaggaaggttaccaatttgtgaaaaggttgctaaaggacagggcattgcttttagccatggaaatgtatggaaagccacaaggcatttcacagtcaaaaccctgaggaatttgggcatgggaaaagggaccattgaagacaaagtgcaagaggaagcaaagtggctagtgaaagaactgaagaaaaccaatggctcaccctgtgatccccaattcatcatgggatgtgctcctggcaatgtcatctgctgcattatcttgcagaatcgttttgattatgaagataaggattttcttaacttgatagaaaaagtgaatgaggccgttaaaattataagctctcctgggattcaggttttcaatatatttcctatacttcttgattattgtccgggaaatcataacatatatttaaaaaattatacatgggttaagagttaccttttggagaaaataaaagaacatgaagaatcgttggatgtttcaaatcctcgggacttcattgattattttctaattgaaagaaatcaggaaaatgccaatcagtggatgaactatacacttgaacacctggcaatcatggtgactgatttgttttttgctggaatagagacagtaagctcaacaatgagatttgctctcctgctcttgatgaagtacccacacgtcacagctaaagtccaggaagagattgaccatgtgattgggagacaccgcagcccctctatgcaggacaggagccacatgccctacacaaatgccatggtccacgaggttcagagatacattgacattggtccaaatggtctgcttcatgatgtgacctgtgacactaaattcagaaactacttcataccgaagggaacagcagtactaacatcacttacatcagtgctgcatgacagcaaggagtttcccaacccagagatgtttgacccaggtcactttctagatgagaatggaaactttaagaaaagtgactacttcattcctttctcagcaggaaaacggatgtgtttgggagagagcctggcccgcatggagctgtttctattcctgacaaccattttacagaatttcaaactaaaatctctggttgacccaaaggacatcaatacaaccccaatatgttcttcactttcttcagttcctcccactttccagatgcgcttcatccctctctaatgaaaaccagaaaacagaaatgaagatgaggaaagatcctgctgttttgttttctgaaggtacccacagaagccttcatttactactgtcatagaaatgccactgtatccttccttcttctcacagcttcggttctctatttgtccaaggataatagttctgcattatatagttcctaaactcaatgtaaaagatcctgataaagaagccacttcaaataaaagagttctactgtga

SEQ ID NO: 890 - DNA, 737 bp, Homo sapiens
cctgtatgaaagttccgagcttgcagctgtagggaaccacgtaaggccagggcgcgtttccggtgcgggcagtcgccaccagagttaaagaccgggcgtcagaaggggaccatggccaacagcgagcgtaccttcatcgccatcaagcctgatggggtccagcgggggcttgtgggagagatcatcaagcgattcgagcagaagggattccgcctggttggtttgaaatttatacaggcttcagaggatcttctcaaggagcactacattgacctgaaggaccgccccttcttttctggcctggtgaagtacatgcactcaggaccggtggttgctatggtctgggagggactgaatgttgtgaagacaggccgggtgatgcttggagagaccaaccccgcagactctaagcctgggaccatacgaggagacttttgcattcaagttggcaggaacatcattcatggcagcgattctgtggagagtgcggagaaggagatcagtttgtggtttcagcctgaggagctggtggactacaagagctgtgcgcagaactggatctatgagtgacagcagggcccctgctttttttctgtctactgacccttgatctcacaggcaggggagcagcagctctagatctttctggaacttctctgaactggaagaagcctctgggcgctgtgactccctgtgcagtgttaagtgccactggtagattaaagtgttttgtctgt

SEQ ID NO: 891 - DNA, 1178 bp, Homo sapiens
agaagggacgcacgcatagagaggggcggagccggagccctggagtgctgctccttgtgtgtgtggggctgggtggtggttggtgcggcagggcggctactcagctgcagcagtgcaggtgccatcctgtggaagaaccatgaagcactacgaggtggagattcgggatgcaaagacgagggagaagctgtgcttcctggacaaggtagagcctcaggccaccatttctgaaatcaagacccttttcaccaagacacacccgcagtggtatcctgcccgccagtccctccgcctggaccccaaggggaagtccctgaaagatgaagatgtgttgcagaagcttcctgtgggcaccacagctacgctctacttccgggacctcggggcccagatcagctgggtgacggtcttcctgacggagtatgctgggccccttttcatctacctgctcttctacttccgggtgcccttcatttatggccgcaaatacgactttacatccagtcggcatactgtggtgcacctcgcctgcatgtgccactccttccactacatcaagcgcctgctggagactctcttcgtgcaccgattctctcacggaaccatgcccctgcgaaacatcttcaaaaactgcacctactactggggctttgctgcgtggatggcttattacatcaaccaccctctctacacaccccctacctatggagttcagcaggttaagctggcactggccatttttgtgatctgtcagcttgggaacttctctatccacatggctctccgggatcttcgaccagcggggtcgaaaaccaggaagatcccataccccaccaagaaccccttcacctggctgtttctgttggtgtcctgtcccaactacacttacgaggtcggctcctggattggctttgccattatgacacagtgtgtcccagtggccctcttctccctggtgggcttcacccagatgactatctgggccaagggcaagcatcgcagctacctgaaggagttccgtgactacccacccctgcgcatgcccataatccccttcctgctctgagcagctcctcccgagctcagcccagtaatgccctccacctactacccctgtcctgatgtggctggccaaggctctccagcagcaacaataaaacctgcttacccaaaaaaaa

SEQ ID NO: 892 - DNA, 1178 bp, Homo sapiens; identical to SEQ ID NO: 891

SEQ ID NO: 893 - DNA, 389 bp, Homo sapiens
tcccgacttcagcagcccgactgccttcttgtcgcttacaccgttgctccagattcaccagatctcggaatggaccccaactgctcctgctccaccggcggctcctgcacctgctccagctcctgcggctgcaagaactgcaaatgcacctcctgcaagaagagctgctgctcctgctgccccgtgggctgctccaaatgtgcccagggctgtgtctgcaaaggtgcctcggacaagtgcacgtgctgtgcctgaagtgacgaacagtgctgctgccctcaggtgtaaataatttccggaccaactcagagtcttgccgtacacctccacccagtttactaaaccccgttttctaccgagcatgtgaataataaaagcctgtttattct

SEQ ID NO: 894 - DNA, 389 bp, Homo sapiens; identical to SEQ ID NO: 893

SEQ ID NO: 895 - DNA, 2750 bp, Homo sapiens
cagactacaggatgcagttcctggttgcgttgctcctgctgagtgtcgcggtggcgagagctctgccatccgcttctaagccaaacaacacatcaagtgaaaataatcctccgattcaaccttccacgcccctgcctcctggggttgatatttctcaacaggtaaagactaacagaccgactgatcagaggctggagtcggataaagaaggccaggacaagacggtggctaggacttcggcatcagtttccagtggggtggaatctgcgaccaatctcaatttggatgattccaaaaagcaccccgaaacagcagatgccaaattgaaggaaactttgcagcagcttttgcctgtggaccccaaacaggaaaagtcaggtcagaagtttacaaaagattcaggcagccccacaggaggtgattccgacaataccacaggaggtgattctaacaagaccacaggagttgattctgacaagacatcaggaggtgattctaacaagcccacaggaagtgataatgacaagcccacaggaggtgattctaacaagcccacctccaaagtcccctccaatacagagactccaaaaattgacaaagtccagctaactgaaaaaggacagaaaccaacacttatttccaaaactgaatctggggaaaaactggcaggggactctgacttctctttaaagccagagaaaggagataagtcttcagagcctactgaagatgtggaaaccaaggagattgaagagggtgatacagagcccgaagaaggttcgccacttgaagaagagaatgaaaaggtgttgggcccttcctccagtgagaaccaagaggggacacttacagattctatgaaggatgagaaggatgaccattataaggacaattctggaaacaccagtgcagaaagcagccacttctttgcttatctggtgaccgctgctgttcttgttgctgtcctctatattgcttaccacaacaaacgaaagattattgcttttgccctggaaggaaaaagatccaaagtcactcggaggccaaaggccagtgactaccaacgtttgaacctaaagctttgattttgattttgtctgcaagaaccttgtcctccctgctgatttgtttccgaatcaagagaaatgaaaagactgacctgtggggtttggtggcaagtctgggctggcagagatgggattgcttcaggttttgcacctgcactttgatgacagtcctctggtggtgttttatttacttttgtgttccctttatgtgatgtgtccatcttccttccattcttggagtacaagcagagggagtgtgtggaaacatggctgtgaccaaaggaagaccccaccttccttaggcaggccacactatggaccaccctcccataacccctttatctttgcaactctaggagcaaactacagaggtgctttctagacaagatgtagaagatgattctgtgggatgctgatgggcagagacagggttgaaatcttctccacagaggcctcagctgcagaccagactagcaagttaaagagtgtcaaggtccagtccgtctgacagtctgtatatctctctgaaatttgcactcgagttgtgctagcacaaaagggactcactgcttctgaaagtaaaatcactgtgccatgggatttttttttttttaaatatggtgatgattattgaactgaaccagtgtgttcttgcatacagtcaccccaataggaacttcctggaaagaagcaaggtttatgccttgtggaagaaaacacatagggctttggtatacaggaaagagtttctcacagtcagttttgctttcatggtctgcagtaggtaagatagacatttagaaactccgtgcgttctccacattcctccacactgtttaagatgccagggaatgagtaatatctttcctatcctgtcatagctactcatgaaattgtaagaaaccaagtaggttccctgagataaccaaagatgtcttggattatgctgtgtctaaagttttattccagtctatatggttacacctaaagagagaaaactcttaactaatctcagggatataaaaggaaccaaaaatctgagtcctgtgcagttggagaagttgaagaagacctggtcttggagctctttctccatgctgactgtagcatgtgcctgaagtttgtatgcttggcaggtggcattctagaaatgaggtcattgctactgtcttcccgactgtgcataagtctgctgttactttttcctagctgagaagccgttttcagtctccctcagctttccgtaactcttcttcagttccccacctcttccattctctcttcctctttagccctgtttgtacacctctgatgaaaacctttccttctagcctacgtgcatgccatccctaccccgttccagttggtgttgcttctattcccttccctctctccctgacatttgcaggtttgccttggtctgttttcctcctgtttctcaaggttactcagttaacagatcaccaaataaaacagcccattttcacagcttataacacttggtaatgatggatgctggggtctgtgcatgttgacattctaggtgtctcttgcaaactgtcctttgccttatcttatggcgttgggggagggtgcccaggtctctcttgctttgactgtcgcatccattatttatcctttctgtgacctcacatttctttggtctccttcccaagaacccag

SEQ ID NO: 896 - DNA, 1162 bp, Homo sapiens
cgggaaggagtttctgtgagactgtgttcatcaggatggtacaagctaagacctggaccctaaagaagcactttgaaggcttccctacggacagtaactttgagttgaggacgactgagctcccacccttaaataatggagaggtcctgctggaagccctgttcctctccgtggacccttacatgagagttgcagcaaaaaaactgaaggagggcgacagcatgatgggtgaacaagtggccagagttgtggaaagtaaaaactcagccttcccaacgggaacgattgttgtggctttattaggttggacatcacattccatttctgatgggaatggactgagaaagctacctgcagagtggcctgacaagctaccactgtctttggctttggggacagttggcatgccaggcctcactgcctactttggcctgcttgacatctgtggcttgaagggtggagaaacagtgctggtcaatgcggcagccggggctgtgggctctgttgtggggcagatagctaagctcaagggctgcaaagttgttggtacagccgggtctgatgaaaaggttgcctatcttaagaagcttggattcgatgtggcctttaactacaagacagtaaagtcattggaagaagctttgaggacagcctctccagatggttatgattgctactttgataatgtcggtggagagttttcaaacactgttatactgcagatgaagacgtttggaagaattgccatctgtggcgccatctctcaatacaaccgcactggcccatgtcccccaggcccatctccagaggtcattatctatcagcaactccgcatggaggggttcatcgttactcggtggcaaggagaagtccgccagaaggctctgacagacttgatgaattgggtttcagagggtaagatccggtatcatgaatacatcactgaaggatttgagaagatgcccgcagcgttcatgggaatgttgaaaggagacaatctggggaagactatagtgaaagcgtgaaaaaaaatggctcacgaatggcttaaccatttaatacaaatgcatatgtaaaacgtaactgcaaggagtttggcctatctaataaaacatggtgggttttttccatctgtgaaaaaaaaaaaaaaaaaaaaaaaaaa

SEQ ID NO: 897 - DNA, 1893 bp, Homo sapiens
gggtgtagaacggtgccaccactgtcttcttcgccaccatgggggcccagctgagcacgttgagccgagtggtactctccccggtctggttcgtctacagcctcttcatgaagctgtttcagcgctcctcaccggccatcaccctcgagaaccccgacatcaagtaccctctgcggctcatcgacaaggagattatcagccacgacactcggcgcttccgatttgcactcccttcgccccagcacatcctgggccttcctatcggccagcacatctacctctccaccaggatcgatggcaacttggtcattcgtccctacacccctgtgtctagtgatgatgacaagggctttgtggacttggtggtcaaggtttacttcaaggacacgcatcccaagtttccagctggagggaaaatgtctcagtacctggaaaacatgaatattggagacaccattgaattccggggccccaatgggctactggtctaccagggcaaagggaagttcgccatccgtgcagacaagaagtccaaccctgttgtcaggacggtgaagtctgtaggcatgattgcaggagggacaggcatcaccccaatgctgcaggtgatccgagccgtcttgaaggacccgaacgaccacactgtgtgctatctgctcttcgccaaccagtccgagaaagacatcctgctgcggcctgagctggaggaactgaggaacgaacattcttctcgcttcaagctctggtacacagtggacaaagcccccgatgcctgggactatagccaaggcttcgtgaatgaggagatgatcagggaccatcttccacctcctggggaggagacactgatactgatgtgtggacccccaccgatgatccagtttgcctgtttgccaaacctggagcgtgtgggccatcccaaggagcgatgcttcaccttctgatggctggatgctggccactcccatgcctgctgctcacgcactcaccacaaccaccttccaccccttccttccccactactgtcctttaccctgacatatgcccacatccatgctggggcctgggttcagcctggcctgcccagccctggtcatccagctgtactggcccctgaggggcccctttgggagcaggcctgtgtatcaggtggcttctgttgaccactttctgaataggcttctgtctggtactaactggccattaccagagatggtccatgaccacccctttatacacacacacatacacatacagagacagagagacagagagacagagatagacagagatagacagagagacagatacagacatagagacagacagagacagagagagaggagtcagagagctgttagtaccatgtctacccgttaccatggaccgcaatgtgtagtaaggaaatgaaaggtaaacagttatctacagtcctaggaaccatgcctgtcacctaaccacctactgccttaggctatggcctggtctgtgcccctaaacactacattagacagtgacacccagaggttctcttaggagggtgtctggcagtgacaggccagcccccacttgctggccaggagttccttgggtcagcacgtggacccttccaaaaccccacacactgcccctcccctccatgatgccttgagcaccctaagttgtcagcccaacagagtttggtagaccttggggtacctggcttgtttctccatcccatacctccctcccatctggttcccagcctggggggttctgagcagagcctcttttctcggagacagacccggtgcctggcgctgccttcagcagacagcagacagcctcctgcacactggctttttttagtcatttatgggcaaaatgagttaaaataaaactttgcaaatcctg

SEQ ID NO: 898 - DNA, 1893 bp, Homo sapiens; identical to SEQ ID NO: 897

SEQ ID NO: 899 - DNA, 1893 bp, Homo sapiens; identical to SEQ ID NO: 897

SEQ ID NO: 900 - DNA, 2908 bp, Homo sapiens
ggaggtatcgaggaagagagaacagggaggtggggcggaggttcctcgcagagcctctggagccgcaggggcttcacggcatgaccagaagcaggagaggaggctgacccacttgttcccatcagctcctgaaggtgacactgagccctgggtggcccctcactgccaaagcagtcacctgtatttgtcagataaagacggccagcccggctgccctttacctccaagtcagagatccagagagccatgggcaaatcgccagagatgtggtgctttgtcttcttttctcttttggcatcgttttctgctgagcctaccatgtatggggagatcctgtcccctaattatccccaggcgtaccccaatgaggtcgtgaaaacttgggacatagaagtcccagaggggtttgggattcacctttacttcacccatctggacatggagctgtcagagaactgtgcatacgactcagtgcagataatctcaggaggtatcgaggaagagagactctgtggccagaggtccagcaagagtcccaactcccccactgtagaagagtttcaattcccatacaataggctccaggtggtctttacgtcagacttctccaacgaggaacggtttactggctttgcagcgtattactcagccgtagatgtaaatgaatgcacagactttacagatgtcccttgcagccacttctgcaataacttcattggtggatacttctgctcctgccccccagaatacttcctccacgatgacatgaggacttgtggggtcaactgtagtggggatgtattcactgccttgattggggagatcgcaagtcccaattatcccaacccatacccggagaactcaaggtgtgaataccagattcggctgcaggagggcttccgactggtgttgactatccggagagaagattttgatgtggaaccagcggactcagaggggaactgccacgacagtttgacttttgctgcaaaaaaccaacagtttggtccttactgtggcaatggattccctggacctctaactattaaaacccagagcaatactcttgatattgtctttcaaactgacctaacggggcaaaataaaggctggaagcttcgttaccatggagatcccatcccctgtcccaaagaaatcagtgctaattctatctgggagcccgaaaaggcaaaatacgtgttcaaagatgtcgtgaagataacctgtgtggatggattcgaagttgtggagggaaatgttggctcaacatcattctattccacttgtcaaagcaacggacagtggagcaattccaggctagagtgtcaacctgtggactgtggtgttccagaacccattgagaatggtaaagttgaagacccagaagacactgtattcggctccgtcatccactacacgtgcgaagagccatattactacatggaacaggaagaaggcggagagtatcactgtgctgctaatgggagctgggtgaatgaccagctgggtgtcgagcttccaaaatgtattccagtctgtggagtacccaccgagccctttaaagtacagcagaggatatttggaggatactctacaaagattcaaagttttccttggcaggtctactttgagtccccccgaggtggcggggctcttatcgatgagtactgggtgctgacggccgctcacgttgtggagggaaactctgacccagtgatgtatgtcgggtccacacttctgaaaatagagcggttgagaaatgcccagaggctcatcactgaacgtgtgattattcatcccagctggaaacaagaggacgacctgaatacacggacaaattttgacaatgacattgccctggtgcagctcaaagaccctgtgaaaatgggacccactgttgcccccatctgcctgccagaaaccttctcagactacaacccctcagaggttgacctggggctgatctctgggtggggccgaacagagattagaaccaatgttattcaactcagaggggcgaagttacccataacatctttagaaaagtgccagcaggtgaaagtggaaaacccgaaagcgaggtcaaacgactatgttttcactgacaacatgatctgtgctggggaaaagggtgtggacagctgtgaaggtgacagcggaggggcttttgctctgccggtccccaatgtcaaggaccccaaattctatgtggctggcctggtgtcctgggggaaaaagtgtgggacctatgggatctacacaaaggtaaagaactacgtggactggatcctgaaaactatgcaggagaatagtgggcccaagaaggactgatccgtagtaacaacacccctccaggactagcaaggtcatttttctcagatcctgggacggtcccattatttcaaaatgatggagagagggtgtgggagcatggttaacgttgaacatgattgtcaagaagcctgcttggaggcagagttgatcactgagccgtgttggttattcagttgctattgctaacaacatgcggaagcctttctgtcttgcttcatcccacagggatatcttaaacgatttccccctcatttaacccgcttgaaatccttattgcttacagtaaagcatgtttccaatctggttctggctgctcgagagcccagaaggagagggaaatttgagggtattttgtcatggaattcaggcatcgacaggttgtctgaaacactatgcagtcagggaacacagccttttttctaagtgagatttacccaatagctggaagtcagaattgactaccttagctttcctttgtgagttgtttcaatatgttccctagaaattagttttcttataatcctcctttgtatcatacaatgtaatgacttaataaaagagaaattgaacattg

SEQ ID NO: 901 - DNA, 2225 bp, Homo sapiens
accagatggcccaaagaggaggcctaggatgcaccccatgacaggtctgtgttccaggagggggaggaggggcatcctcaggctcctgcttcccatctcttcccccaaacagtgatgcctcgaacagtggcatgttgcctcgacttggtgacctgcttttctacaccattgcagaggggcaggaacgcatccccatccataagttcaccacggccctgaaggccactggactgcagacgtcagacccacggctccaggactgcatgagcaagatgcagcgcatggtccaagagtccagcagtggtggcctcttggaccgagaactcttccaaaagtgtgtgagcagcaacattgtgctcctgactcaggcattccggaagaagtttgtcattcctgactttgaggagttcacaggccatgtggatcgtatatttgaggatgccaaagagctcactggaggcaaagtggcagcctacatccctcacctggccaagtcaaacccagatctttggggcgtctccctgtgcactgtggatgggcagcgacactctgtgggccacacgaagatccctttctgcctacagtcctgtgtcaagccactcacttacgccatctccgtgagcaccttaggcaccgactacgtgcacaagttcgtgggcaaggaacccagtggtctgcgctataacaaactctccctcaacgaggaaggaatccctcataaccccatggtcaatgctggtgctattgtggtcagctccctgatcaagatggactgtaacaaagcagagaagtttgactttgtgttacagtatctgaacaagatggctgggaatgaattcatggggttcagcaatgccacattccagtcagagaaggagactggggatcggaattacgccattggctattacctcaaggagaagaagtgcttccctaacccagtggacatgatggctgcccttgatctctatttccagctgtgctctgtggaggttacctgtgagtcaggcagtgtcatggcggccactcttgccaatggcggcatctgccccatcacaggggagagcgtgctgagtgcggaagccgtgcgcaacaccctcagcctcatgcactcctgtggcatgtatgacttctcgggccagtttgccttccacgtgggcctgccagccaagtcagctgtgtcgggagccatcctcctggttgtacccaatgtcatggggatgatgtgtctgtcacccccgttagacaagctggggaacagccacaggggcatcagcttctgccagaagttggtgtctctgtttaacttccacaactacgacaacctgcggcactgtgctcggaagttagacccacggagggaagggggggaagttcggaacaagaccgtggtgaacctgttatttgctgcatatagtggagatgtctcagctcttcgaaggtttgccttgtctgccgtggatatggagcagaaggactatgattcccgcacagccctacatgtggcggcagcggaaggacacattgacgttgtcaagtttctgatcgaggcttgcaaagtgaatccttttgtcaaggacaggtggggcaacattcccctggatgatgccgtgcagttcaatcacctggaggtggtcaaactgcttcaggattaccatgactcctacatgctgtctgagactcaagctgaggtagcagctgagactctgtcaaaagagaacttagagagcatggtgtgagcacaggccaggggcagcccctgctcaagaaaaagcatgagccggccacacatttaacccaaggccaccaaaaatactattgcaagctgcttcagtggggatcaacacagccatctggtgacacaggccagtgttttctgtgagaatcaaaatgccccattccctcatcggacagcacagagaaaagcttcagtggacacctgagcagagctagccacggagacctcaaggtatagcttaagtgacatcctccaccagaaagtagcccaggcttttacccaggtccccatttcaacttccttggagagcctctagctacatgcatatgtatctgtcacagagcaagagaggtgggtgagagcccaatcacctggctttagaaatctgcagagatctgtccatcttagccaagacatgctgctactgctgacaggagttttatagacaaagtattttgtgttcaaataaactttaattaccggaatt

SEQ ID NO: 902 - DNA, 3105 bp, Homo sapiens
cagaaggaggaggcagagttggagttgggcagacgctgtggagagctagctgcaggacgctgcggagttgcagggctccgcgctgctccattcattaagtagctgcggaggatcgtggccggacgccgacgctgcccactcgcaaacttcagcacgcagacgcacgccagcccggcgcgtccgggacagcacagttttgcaaaagttcctgctcgggatttggctctcttccctttggactagcgaacagtttggggttgagaggaaagcagaggcgctcagggggaaacctacccgcgtctgcagttggagctactcggccgggctgtacactcgccgccgcgtcccgagcccgcagatccgctcctgagcagcggcggcccgcagcgccccgggaggctccccgcagccagcgccatgcaaagctacaagtacgacaaggcgatcgtccctgagagtaagaacggcggtagcccggcgctcaacaacaacccgaggaaaggcggcagcaagcgggtgctgctcatctgcctcgacctcttctgcctcttcatggcggctctgcccttcctcatcatcgagacaagcaccattaagccttatcgtcgagggttttactgcaacgacgagagcatcaagtaccccctgaaagtcagcgagactataaacgacgccgtgctctgtgcggtggggatcgtcatcgccatcctggcgatcatcacgggggaattctaccggatctattacctcaaggagaagtcccgatccaccattcagaacccttatgtggccgctctctataagcaagtgggatgcttccttttcggctgtgccatcagccagtccttcacagacatcgccaaagtgtccattgggcgcctgaggcctcacttcctcagcgtctgtgaccctgatttcagtcagatcaattgctccgagggctacattcagaactacaggtgccgaggagaagacagcaaagtacaggaggccaggaaatccttcttctcgggccacgcctccttctccatgttcacaatgctgtatctggtgctttatctacaggcccgcttcacctggcgtggggcccggctcctccgccccctcctgcagttcactttgctcatgatggccttctacacgggattgtcacgtgtatctgactacaaacaccatcctagcgatgtcctggcaggatttgcccaaggagctctggtggcctgctgcatagtgttcttcgtgtctgacctcttcaagactaagacgaccctctcactgcctgcccccgcgatcaggagagagatcctgtctcctgtagacatcatggacaggagcaatcaccacaacatggtgtaggtgctgcggcctccagagcactttctctgaagcgactgcttgacagcatgtccctgctgctctccaatctcatcagacagtagaatgtagggaaaagctttttgcccgatggattttgaaaacatttaaagaaaaaaaaaaagccttaccttgtggccttccaaaataggttgtttgcctgtgtggagacaacagtgccggagtcctgagtgctggctgcacagctggctaagtgttcatgttctagtgagcacgggcttgtcaggagcaaaacactaggataattgagcagaggctgtggtcaccttttgtgacccgagaaatcccaggccagaatagcgggggcgcttatgtagcatgcaaggcctgaaccagcaccgaatcagcccctctgcctgccccactctactgtgactttgattcaaggaagtttttgcgctttgaaataccgggaatgaacacacagtttttcagtcgagggatcagatcctgaatccaaaccccatgtcctgaggcctctgtcatctctccatccccaggctaacaaccacagtcccctcacttttagagattaggagaccctttgtggaagagtgaacttcacaaatagcacaagttcagaagacatgtagggtgtcttctcacacaccacactgtgacgcacgcggaactgccattgcggggtcaatcaccaggcacttgcacgtgtagaaacccgtagactttggttactgctatatcccccttgagatccttgctgggtgcctaccaggatttcatgtgagggccagggatgcataggcatggccaacctttggtggatcaaaagagcctcagtagagagacagggagggagggagagggcagaatgaaaaaaaagtgaaccaattcttttggctccttgggtttagagagagccagggtagcagacagtcttatgcccaaaaggtacccttccagataagggagccccaagggtcttcgcaggagttgatcttgctgtgtaaagcactgttgtcgcagggttgacccctgggacagttcttggtgggttctgctgggcagaacacataggttaaatctgtgtcgagagttttcctcatactctatccacaagtgtccttccaagcaaggtcccactctagccagtagacaaggtcccttctactgaacctccaaggaaaagaagaaggagaagaaaaagtgcttttcaaatctttcaaagggctacatgtaaccatatggatcaaccacatgcatatcctcccagactccgtcctttcatttcaacatatagcaagctatgattttatatataaaattatataaataatgtataaaacagtaaaagttaactatgtaagatattatttctgaaacaatgttagtcacacccactatgattataaactgtgtcttgacctgtgttatttactttagctgcttaaaggagcattgagtttttttggtttgttttttttttttttttaatctcaactaaagatatcatagttctgtggtagccattgttttacaatgaaataactgcgactagagggaaaaagaactgtataaaaacattaaattgtcagtatttttgtaaggttccgttttgtaaagagaataatattcaaacacttctgtggcatacaaagtgaaaaatgtgtatctgagaaactaaacatgtattaaatgtgctttttaaaataaaagctcataacatgaaaaaaaaaaaaaaaaaaaaaaaaa

SEQ ID NO: 903 - DNA, 5924 bp, Homo sapiens
ggcacgagcggcgcgcggctagcgggctgaggcgggaggtcggcggcggcgcccctctggccgggctgtgcgcggggcccggagcggcaccgcggccgcccgcgcgggggctccccatggtgcagcggaggtcgggatgtcgaagacgttgaagaagaagaagcattggctcagcaaggtgcaggagtgtgcggtgtcctgggccgggcccccgggcgacttgggcgctgagatccgcggcggcgcggagcgcggcgagttcccttacctggggcggctccgtgacgagcctggcggcggcggaggcacctgctgcgtggtctcgggcaaggcgcccagtcctggcgatgtgctgttggaggtgaacgggacgcccgtcagtgggctcaccaaccgggacaccctggctgtcatccgccacttccgcgagccaatccgtctgaagaccgtgaagccaggcaaagtcataaataaagatttgcgacattacctgagtctgcagtttcagaaaggatcgattgaccacaaactacagcaggtcatcagagataacctctacttgataaccatcccatgcactacaagggctcccagggatggggaagttccaggggtggactataatttcatttctgttgaacaattcaaggcactggaagaaagcggagcattgttagaaagtggaacgtatgatggaaatttctatggcacgcccaagcctccagcagagcctagtcctttccagcccgatccagttgatcaggtcctctttgacaatgagtttgacacagaatcccaaagaaaacgaactacatctgtcagcaagatggaaaggatggacagctctctccctgaggaagaggaagatgaggacaaagaagctgtcaatggcagcggaagcatggaaactagagagatgcattctgagtcgtctgactgctggatgaagactgttccaagttataaccaaacaaatcgctccatggactttagaaattatatgatgagagacgagaatctggagccgctgcccaaaaactgggaaatggcctacactgacacaggaacgatctacttcattgatcacaatacgaagacaaccacctggctggatcctcgtctctgcaagaaagccaaagcccctgaagactgtgaggatggagagcttccatatggctgggagaaaatagaggaccctcagtatggaacatactatgttgatcacctcaaccagaaaactcagtttgaaaatccagtggaggaagcgaaaaggaaaaagcagataggacaggctgaaactcattccgcaaaaacagatgtggaaagagcacactttacccgggacccatcccaacttaaaggtgtccttgttcgagcatcactgaaaaaaagcacaatgggctttggtttcaccattataggtggagatcggcctgatgaatttctacaagtaaaaaatgtgctcaaagacggtcccgctgctcaggatgggaaaatggcaccaggtgatgttattgtagacatcaatggcaactgtgtccttggtcacacccatgcagatgttgtccagatgtttcaattggtacctgtcaaccagtatgtcaaccttactttatgccgtggttatgcacttcctgacgacagtgaagaccctgttgtggacattgttgctgctacccctgttatcaatggacaatcattagcaaagggagaggcgtgcatgagtactcaggattttaaactgggagcaatggttttggatcagaatggaaaatcaggaaaacttttgtccagtgatcgtctcaatggcccatcagattcaaatgagcaaagagcatccctggcttcatcaggcagctcccagcctgaactagtgactatcccgctggttaagggtcccaaaggcttcgggtttgcaattgccgatagcccaactgggcagaaggtgaaaatgatactggatagccagtggtgtcaaggccttcaaaaaggggatatcatcaaagaaatttaccatcagaatgtgcagaatttaacacatctccaagtcgtagaagtactgaaacagttcccagtaggtgcagatgtcccgttgcttatcttaagaggaggtccttgttcaccaactaaaactgccaaaatgaaaacagatacaaaagaaacttcaggaagtttggagactataaatgagcctactccccagcctatgccttttccacccagcataatcagatcaggatccccgaaattggatccttctgaagtctacctgaaatctaagactttatatgaagataaaccacccaacaccaaagacctagatgtctttcttcggaaacaagaatcggggtttggcttcagggtgctgggaggagatggacctgaccagtctatatatattggggccatcattcccctgggagcagcggaaaaggatggtaggctccgtgctgctgatgaattgatgtgtattgatgggattcctgttaaagggaaatcacataagcaagtcttggacttaatgaccactgctgctcgaaatggccacgtgttactcactgtgaggaggaagatcttctatggagagaaacaacccgaggatgaaagccctcaagccttctcacagagtggatctcctcgcctaaatcggacagagcttccaaccaggtctgccccacaggagtcctatgatgttatcttacagaggaaagaaaatgaagggtttggttttgtcatcctcacctctaaaagcaagccgcccccaggagttattcctcataaaattggccgggtcatagatggaagtccagctgatcgttgtggaagactgaaagttggagaccacatctctgcggtgaatgggcagtccattgttgacctgtcccatgataatattgttcagctcatcaaagatgctggggtcaccgtcacgctgacagtggttgctgaagaagagcatcatggtccaccatcaggaacaaactcagccaggcagagcccagcactgcagcacagacccatgggacaggcgcaggccacccacatacctggggacagaactgccctagaaggtgaagttgggaaagatgtctgcagctcttacagacactcctggtctgaccacaagcaccttgcacagccggacaccgcggtgatttccgtggtgggcagtcggcacagtcagagccttgggtgttaccctgtggagctggagagaggccctcgaggctttgggttcagcctccgaggagggaaggagtacaacatggggctgttcatccttcgccttgctgaggacgggcctgccatcaaagacggcagaattcacgttggtgaccagatcgtggaaatcaatggggaacctacacaaggcatcacacacacgcgagccattgagctcattcaggctggcgggaataaagtcctcctccttctgaggccaggaactggcttgatacctgatcatggtgattgggatatttatagtccttcatcttccaatgtcatttatgatgaacagccaccacctctcccctcttcacattctgctgccacatttgaagagtctcatgtgccagtaactgaagactctctgattagagttcagacatgtgaaaaggcagaagaattaaaggacactgtacaagaaaagcactttaaatggaagccagcctgagatgaagtatcagtctatccagaaaaatgtgagtaagaaggatccatccagaagtcattgggcatggtgacaagaatctacttaaaggagaaaattggtgttacacggagaggtagatctgctagtcccaaaaagtcagttaatcgacattcagaggaacatctggaaaagattcccaggccccttagaagtgaccccaaaggaaaatctagagaccggtcactcagccctaggaaaggagaaaataaaggtcaggtcaccattaaggcgggctctggacaagatccctgtagaaaagacagaggacggtcttctagccccaggaagcagcaaaagattggaggcaacagcctgtcaaacactgaaggcaaattatcagaggctgggagccgaagagcagcaggcctctctagtgacagccctgaacagctcccagaggggaaagaaaagtcaggggtcagcaggaaagatctgaagctcagtcagctggggaaaaacagaacaaggtctccagagaaaaggagcagcaaagttgatgaagcgtctctcccatccaaaaagactagtgacactgctagtagggtagtgtctgaaaaggagaaaggaaggaagccaggcacaggagaaagaagtagagacaaaacaggagaaagcgtccagacctcagcaaagccgctcacgcaggaagcgggagagaagatggcattaagcaaagcatcagaggtcactgacagaggcaaggagcgtgcagggggcgcacctgagagtagctctccagtcaagaaagcacccatcactccaggaccctggagggtgccacgtgcaaataaagtcacaggcactgctggcatggctgacaaacagctgtgacctttcgtataaaacaaagaaaattaagttgtaatcttgactaacacagaattctttgaaggtggagagttgtggttttcccccagaaattcttcaataccaggtagccaggctgcatgaagggcttctgagattgccaagacccacctggccctggctggctgcccttcctcatgctcaggaaggagctgcatccaagggctcacctgccatgccctgcacaggccgctcgctcagcagtgacatgatcttaacagtgtggtcacaactcactttgtgtttgtgccaagttatctactgtatcatgtctgttttatccttcccattctgatcaaacagttcagtttggcttgaagatgttttcagtagcatgttgcatgtttacagacgggaatatgtgagtccttgcagaggaagaaattgttagctcatcattaaagtgggcacttgcctcttctcacagcttctgaccatcctagtttaaaaatgcaattcacaaacatcacattacaggaaaggtcaaatattagaaatgctttttttacggctaagtaaggtgtttaaagtaactgttaaagatactccttacagttgaatgctcaaacgagaacgtactgtaagcaactagaattaacaacctcctgccatgttagccatcgcctatgtagtgacagtgtctcagatcagcggtagccttgggggaagtacaagagcatgtagaagcactgcttgtttctctttaaagaaaagctctactacatctggagattttgaatattaatcactagtctttaatatatcgttgaagacccaaaatatcatagatttagtgagggacttgatcacgagaccagttctacagtccacggccagaaaaagcaccagcccttgccacgtaggagtcaggaggggcaggcatgcgagcgtcagcatttagaagcagagcctgtcttgggcttcctccacaagtcaggactaatatggtatagactgtgtgtattgaaactttaatttttagctaattatttaaaaacaaagttttcagagttctttttaaagtctaataaaaatgtttgctgaaagttggagacagttcttaaactcatacaatagatccagacatcagctccctgacgcagcattcagaaacatctataaatacagacatttctcagaactgtctatctgtggagtatttaaacactaaacactcattctgttaccttgtgagtctgacaaattccactgtgacaactgtactggccccttatgacacatgcttccatccagaactgtgttgaacccatctcaaaactacttgaaagctaagaaggcagtgctgaaaggtgtccacagtcacaaaaaaaaaaaaaaaaaa

SEQ ID NO: 904 - DNA, 1133 bp, Homo sapiens
cctcggctgagctgcattccaatcccagctacatccggagcccagctacattcgagcccagccacatcccgagccaaccttccagaagcaccatgaacccaagtgctgctgtcgttctctgcctcgtgctgctgagtctgagtgggactcaagggatccctctcgcaagaacggtgcgctgcacctgcatcgacttccatgaacagacgctgagacccagggccataggaaaacttgaaatcattcctgcaagtctatcctgtccgcatgttgagatcattgccacaatgaagaagaacaatgagaagaggtgtctgaatccggaatctgaggccatcaagagcttattgaaagcggtgagccaaagaaggtcaaaaagagctccgtaactagagagaagccactcgccacagtgctgagaccgatggacagcagagagacggtctctccacctccctttacccagtgtgcggctagtcctaactgtccctgtttctcctgaccatggtcccatcagctggtactcccactacagcgtgatggacaaggcctggtcctgagacaaaagtaactccagcagcaaggcttcccaattctctaagagctggtccgaatcttccctcaggcagctatgacggctctcctagctctgttccgtaagctatgtgcaggtactaatctcttcagcatgtgccatgccccagcctgctccacacaccctccttctccctagctctaagctcatcagttctgagttcacctgagctcctttatttcaaatgcagtccaggtgagatggcaaatcaagtttgtcagaacaaacttaccaccaccttcccaagggaatttcataactcagaatactcacaggaacctagacatgcatgtttaaatattatttaatgaccgactgtacaaagtggaactcctagatgtattttttgtacgattttcattgtatatgtaagaacttgtgtggttaagtatgtatcaatgggtagttaaagtttacataggcaaatgctttgaatgctacatattacaagatgtgttggatggttttcaaaataaaatgtactgtattgaatgtagtatgagacaaaaaagtaataaagtaataataactgacatga

SEQ ID NO: 905 - DNA, 1422 bp, Homo sapiens
gtctccagtgtcacaggcagcttctcaaagtattatgtacttcaaaaaacggagatggtttctgatcctggaatcgcttttgctgtctttggtaactggatttcaagatcaatcagtaccaaatgtaaatgccataaccggcagcaacgtaaccctgacaatcctgaagcacccacttgcatcgtatcaacgtctcacctggcttcatactaccaaccagaagattttagagtacttccctaatggtaaaaaaactgtcttcgagtctgtatttaaagacagggtcgatcttgacaaaacaaatggtgcacttcgtatctataatgtctcgaaagaggacagaggtgactactacatgagaatgttgcacgaaactgaggaccagtggaagataaccatggaagtatacgatcttgtgtccaagcctgccatcaaaatcgagaagactaaaaatttgactgactcctgtcacctgaggctatcatgtaaggtagaggaccaaggtgttgactatacttggtatgaggactcggggccctttccccaaaggaatccaggatatgtactcgaaatcaccatcactccacacaacaagtctacattttacacctgccaagtcagcaatcctgtaagcagcgagaacgacacactgtactttattccaccttgtacgctggccagatcttctggagtccattggattgcagcttggctagtggtcacgttatccatcattcccagcatcctgctagcctgacaagatctctcctcagtcaagaaggaaacatcaaagccgtatcttgccttcatcccctgcactgctcctaaccattgacgctgctctggctccgtggagcaaaggaaagtgtgttattgttatctgtgctggtttgaatgcatgctctatggagtaagcacaggacctagtacagtgctacatcactgatctttacaaagattctaagctaattttttaaaaactgggggtagcatctaattttatataccctagttgtttcctaacattcattgaagataaatgcattccttttaccaaaatatgtggctatcttatactaatgttgtttatatcactctttttttataaagataaatgcattcctttaccaaaatatgtgactatatcatgctaatgttgtttatatcactcctttttgtgaagataaatgcattccttttaccaaaatatgtgactatgtcatgctaatgttgtttatatcactcttttttataaagataaatgcattccttttaccaaaaacatgtggctatattatactaatgttgtttatatcactcttttttataaagataaatgcattccttctaccaaaatatgtgactatatcatgctaatgttgtttatatcacctttttaaaaataaaatcttttcacatact

SEQ ID NO: 906 - DNA, 1897 bp, Homo sapiens
gccatcaggtgagccaagatgggtgcatacaaatacatccaggagctgtggaggaagaagcagtccgacgtgatgcgcttccttctaagggtccgctgctggcagtaccgccagctctctgcgctgcacagggctccccgccccacccggcctgataaggcgcgaaggctgggatacaaggctaagcaaggttatgtcatttacaggatccgtgtccgccgcggtggtcgcaagcgcccagttcctaagggtgcaacctacggcaagcctgtccaccacggtgttaaccagctgaagtttgcccgaagccttcagtctgttgctgaggagagagctgggcgccattgtggagctttgagagtcctgaattcctactgggttggtgaagattccacatataaattttttgaggttatcctcattgatccattccataaagctatcagaagaaatcccgacacccaatggattaccaaaccagtccacaagcacagggagatgcgtgggctgacatctgctggccgcaagagccgtggccttggaaagggccacaagttccaccacaccattggtgggtctcgccgtgcagcctggagaaggcgcaacactcttcagctccaccgttaccgctaattgacgtaatatttgtaaaattcatatccaataaacaacttaggacagtcctctctgctcacaggtgttatttgtctgttagaactagcctgcgggtcgtgagtgctctgtgggggatgggagctaaagtgcagtagtaggaaacggcgagtggcggcgcgtcttgtttctgatgtactctgtttgcaatttttgcttaggggattaagtgtatagtgtttgtgccaagtggtatcctgtgtgtaagacttaaagtcctgaaactagcctagatgcatgagagagaacctacagctttacagtggggtctctgttcactgaagtggctggctgcttggaagctggatgagtacagacagggagttggattttgcttagaaatatgtaggaagagagggcttcaaacctgttttgtgactattcatagaagagagatcaactatagctcacattttgagaattgaatccgtgttccattttcagaacactgggtaaatttgttggaagaggtttcacttctgttggatctagagcataggtttgacatgtgtggattttgaagctagtgaagattgaacagtggatagggaagggcagattatttccattaggatttataagctagtaaccatgtggttgcaagttcctgtcaaccaagcaaacacagtaagtggtgtcaggcttacaaacattaagctttagtagcagctggtgtgtgaagaggcaggtggatctccaattccaggactgcctacagtatagagaaaatgtctctattcccgtccataatagagcaaaaccaaaaattgggggcttccaatcaattcgtcttgggtaaggaacgtccattggtagtttgatttcattgtttacagtctgcccgtgggtagatgctcaggttgctgtctcctggcattgcctggacattctacactcataaaggccacacatgccactatgttttatttctatttgtgccatgccttgtagtttcccaaagtgatttgagtggaaaaagcagaaatcgtccctattacatctgggtttgctcttttggacagcagctagcttggtatccaagtctaagtgatgcttttattaaaccgatttttccttggagatttttaaaggaagatttgatttccagaaaatacttgagacctaaaattctcagcaaaacaagtcactgtgtgtagaggttgttcaactagaataataaatgtctgttaaacaagtggaaaaaaaaaaaaaaaaaaaaaaaaaa

SEQ ID NO: 907 - DNA, 4689 bp, Homo sapiens
ctgaacacccatccggtgagacaggagggcaggtttccaagcgccgctccgccacacttgatctcagcgctgggaaagtgaagcgagcaaccgacagccacgatgccggcccacatgctccaagagatctccagttcctacacgaccaccactaccatcacagagcctccttccggaaacctgcagaatggacgagagaagatgaagaaggtgcccctctatctggaagaagacatccgtcctgaaatgagagaagatatccacgaccccagctaccaggatgaggaggggcccccgcccaagctggagtacgtctggaggaacatcatcctcatggccctgctgcacgtgggagccctgtacgggatcacactgatcccctcctccaaggtctacaccttgctctgggggatattttactaccttatcagtgccctgggcatcacagccggggctcatcgcttgtggagccacaggacttacaaggctcggctgcccctgaggatcttcctcatcattgccaacaccatggcgttccagaacgatgtatatgaatgggcccgggatcaccgcgcccaccacaagttctctgagacacacgccgaccctcacaactcccgccgtggctttttcttctctcacgtgggttggctgcttgtgcgcaaacacccggctgtcaaagagaagggcggaaagctggacatgtctgacctgaaagctgagaagctggtgatgttccagaggaggtactacaagcctggcctcctgctcatgtgcttcatcctgcccacactggtgccctggtactgctggggcgaaactttcctgcacagcctgttcgtcagcaccttcttgagatacactctggtgctcaacgccacctggctggtgaacagcgctgcccacctctatgggtatcgcccctacgacaagaacattcaatctcgggagaacatcctggtttccctggggtccgtgggcgagggcttccacaactaccatcacgccttcccctacgactactctgccagtgagtaccgctggcacatcaacttcaccacgttcttcatcgactgcatggctgccctgggcctggcttacgaccggaaaaaagtttctaaggccgctgtcttagccaggattaagagaactggagatgggagccacaagagtagctgagttctgggcttctgagttcctgttccaaaagttttctgggcagagatttaatattctgttgattaactactggataatgctatcggaatgttaatgatgcatttaaactattccggtacagtattatgagaaagctttgatcatgttttgaggtaatgcatattttaattagccaggattaaccatgccacaatacatatatatttctaagcatacatgataaatgcatatacaattgtgcacatcagctttaaataataacgatgaatttgaacattctatacagagagtattaaagccaaggaacatgctgttttgatgctagggcaagcatggtgctctttccctgtttgcactgcatccagcttcgttccttcctctgtcatcaccatcttcaggcaaatagctgaccagccactggcctgtgtccaccttccaaagcccaggcaacctttctgctttctgaaatactgatccttcctcctggatatgtctttccttgttctgaactttgagattgctggctcagacttaagatagaacaaaaaccttcctggaagttcccactggtgaacttcactataggttttgccagagggaatagggaaattatcttgattgtagcaagtagatcaccttgagagaagaattagcacgcacggtgtggtttgtaagtaaggatgggagagagctaggaaaaggtggccatatctaatggcctacttaccaagcccccaggcctctctgcataggcatggagtccttccagtccatattctgaacaacagtttttagtgagatttgaataattaaattattttcagagtgaagggaatgggaaatgcatggtctgtgccaggggcggagagtggggaagggttagcttttggtaactgaagatttcttcaatggaaagactcttaatgttaaatgtgcctagaactggtaactaaacagctgacatttggagggaatgtggtgaaaactatgtaaatataagcaaaatccgcacatgaaaatatttcacttagaaaaagtgttgctaaagaaaaaaattcgaaggacaagaggtgttgcctgggttgccagtttctttcgtggcagggcaggaaatagtgaggttgagaggcagcatctgtaagtagatgctaagaggtacatttctaaatgaagcccttggggaacatctgccagggatctagagagtgctggtttcatccattgttttaatttcctccttggattgagtagaaacgtggcttcttgtggtgttgaaccttccccgacttctttgctttgttgccatctagcctgcccagcactgcctagggagcgcctacccaccctgatttcttctgccagctcctacccaccctgatttcttctgccacttctttctttggcattcatttttctttccctggacaggaagctagttacccgagtgtatcaggagcacctggcttgcctttgtccaggcccattcctcctggtatccttgggtgtggaactgctggacagcttcaggaagcagagccaggtgccacttttctgtggctccagatcctccctacctccacccctatgtgcctctgccacagtaatttcagaaaagcttggtacaccctctagcaacatcttggttcagagagtctctctggcttgtgagttaacagctcagccaaatgctgtgttgtctcagtgaggcaaccactgaacgagagggttggttgttgggctgtctctgttggagtcagagtagacaacatgttcacttcttcctgtctgctttgcaaggtgtctgtgactgatcaaggcaggcagggagtggtatagtacttctgaaaggaagaagttccctatttatctgttaaaagaccagaggcatgggcaagtgctcaggacctcacttcgggaagagggtctgcttcctgaaagccagtgtataaggaaaagcttcgactgaacctggtatctaaggtaccatgaactaacactctatcacacagcccagggcaaacagtggtatagaaaagtctagaagaaaacatcacatcagtattttagaaccatccacctttactgtccctgtagcccaatccagagcctggcttttagatctggctgcgtacagtgccaaatgctcagtttacttgtaagatcagagcctttctttctgtgttaattgaacacatgctctgagctgttttgttgaagtagaaaatctagtagaaaatcactgtagatctgatgacctggaaacctctggaaatgccttcgggtggttttatttttccaggtcacagatgcctgatttataagatgaacaatgaaatcagctttctttctcttctgatcttattccctggatttgatgcagcccatgttccaaagcaaagctacatagagacttcaggctgaggtcctggtgtctttaagcaaggacactctttcagatcctctcagaggcgtatttgtaacagtttccacatgaatgtactaatcatgttgggtgccttatcgctttcctaatctacagtgcctgttagcccagcctcactccttcccttaaccctgagatcccgtagatggagcgggtgtagacaagaggctggctggaggatcatcagtacagtgatttgcagaaatcttttatgggcttcattttggaaaaatttgtttttagtaaatgctcaaatttggtgggaagtaatttgaatgtatttgattgtattgtcctcattacaattgttaattagacacgttctacatgacagtagtactcaggggagttttctccctgggctgctaatatctgggtgtaatctctgaaactgtaggtccagtgaggcggcgtgaaaagttagcaaagccaccatctgctggtggtttaagccaaggcctctcttcttcgccactgacttgctatgttatcctttctcttgtaacaaacccatcccagagatgaggcctttaatcatcccaagaacctcctgggctaagtatctgacagtctcacatctcaacatcgtgtattaagtgtccagaacatcagctcaggaggacacgctgaaactctcactctgggcgagtcctgataaaacaggctcctaatactgacctacctcaagggcagttctgaggtgattagagccttttctttttttaagcaagtgtttggagatgcatggcagaggttttcctgcagacttgtaaagagctagatgtgttctaagaccatctttagtctacattgctcttcccagagatctacaactatgacccagccaaagtgcaagcctacctactcactgccataaaaactattcaggaaaccttttcctggcctgaatgagattttgttttttttttttttatgtggggcggttatttgtgacccaagtgtaatttggatgatttttaattaatatcaactcttgaagcctaatatgtactggatttgagattgcatttgttcctaataaaagtggatctagctgtgctgcctgg

SEQ ID NO: 908 - DNA, 4689 bp, Homo sapiens; identical to SEQ ID NO: 907

SEQ ID NO: 909 - DNA, 2004 bp, Homo sapiens
ggtgccgcagcactttagcagcggaagcggctgctgttgagtacgtgacggctggggtctggcacgggcgtgctgggactccgagataggctcagtgaggctggcagcggtccacgggcgcgggcgcaggcggctctgagacctcaggacaagatgcgagccacatctctggctgcttctgccgatgttccctgcaggaagaaaccgttggagtttgatgacaacattgatgtcgagtgtccagtcttaaaacgagtgagagatgagcctgagcctggaccaacccccagcctacctcccgcctcagacttgtcacctgctgtggcccctgcaacccggctggggccctatatccttttggaacgagagcaaggcaactgcacctatcgggccctgcactgccccacaggcacagagtacacctgcaaggtgtatcccgccagcgaggcccaggcggtgctggcaccgtatgcaagactgcctacccaccagcacgtggcccgtcccacagaggtcctgctgggctctcagctcctatacacctttttcacgaagacccatggggacttgcacagtctggtgcgcagccgccgcggtatccccgagcccgaggctgccgcgcttttccgacagatggctagtgcggtggcacactgccacaagcacgggctcatcttgcgcgacctcaagttgcgtcgatttgtcttcagcaactgtgagaggacgaagttggtgctggagaacctggaggatgcctgtgtgatgactggaccagacgactctctgtgggacaagcacgcgtgccctgcctatgtgggaccagagatactcagctcccggccatcctactccggcagagcggctgatgtctggagcctgggcgtggcgctcttcaccatgctggctggccgatacccgttccaggactctgaaccagccctgctctttggcaagatccgtagagggacctttgccctgcctgagggcctatcagcctctgctcgatgcctcatccgctgtctcctccgcagggagccttcagagcgacttgtggccctgggaatcctgctacatccctggttgagggaggattgcagccaagtctctcctccacggtctgaccgaagggagatggaccaggttgtcccagatgggccacagctggaggaggcagaggaaggggaggtggggctgtatggctagagccaccttaactggcccttcagctccaaggtgtgagttgagtactggtgtctcagctttcgcctgcctttttgggccaagctaaactgtaagtgcctttctggaggaagaaacagccattgtgcttcatgcattcctgtgcacagtggggtgatgctgtctggatgacaagccctgttctaggtgctgtgaacagcaaagaaaaaaaaaaaagagggagaagcataccttgctggccgagttaccacagtgccacatgctccccaggccagcatctaccctctgcccggggcatatttcataccagggctgggccttctctggtctggtgctaggcttctgttcatgggacagtccctttcatcagtgccccagctgccttctgtcttgtgcctttaaacaaagggaacatctctgtgccaaagaccaaagtccccattcaccctgtgccttggggccacaagtgaggccaagctgggattgtggcctccaggcaggagaacctgcttgaagacctggctgctggactcaagccaaaaggatgagactccaataaagaggcatctggctcaaagaatggtctagaatgaggatccaggtctgtctaccctggtagcctccagctggagcatcaaagttggagggggaaggaccaggcagggactgtcctattgccatttagagtctcaggccctgctcttgggattcttagtatccaggactgctgtcagtttgatgactttggtttggttgagtatgtattttcaccatgtgcccaataaaagagagctgtgtggtttt

SEQ ID NO: 910 - DNA, 1554 bp, Homo sapiens
gatagtcaccagggtcactacaggaggaattgttccatctgagagacccagcatgcattatactcgctgtctgctgcttctcctggctggactcttggaactctctcacagtcagccagaccaagaagagcctgacaatacaaccaaccaaacctacagacagttctcacagcagaacatctccagctaccagattgcctctggcaatgccaactttgccttccgcctctaccacctgatagcgtcccaaaactctgagaagaacattttcttctccccactcagcatctctgtctctttggccatactgtccacaggggctggtggggacacccaggctcagatccttgaaggtctgggcttcaacctcacaaagctgtcactgcctgaaattcatgagggcttcaggtccttgcagcacacaatagctcgcccgttcactgagccacagatctctgtaggcagtgcgctgatcctgagccagaacctgcagatcctctctgagtttgtcagtgccatcgaaacctcctataacagcaaagtcttacatgctaacttcagagataaggaggctgcggtccagctcatcaacaactatgtcaagcagaatactcaggggaagatcaaaaatttggtcagtgacctgagcccagatgtaaagatggtgctggtgaattacatcttcttccaaggtctttggaagaaaccctttccttcttccagagtctctaccagtgacttctatgtagatgagaacacggttgtgaagatacccatgatgctgcaagataaggaggatcactggtatcttgaggacagacgtgtaccctgcacagtactgcggatggactacaggggtgatgcagtggcgttcttcatccttcctgaccagggcaagatgaatgaggtggagcaggtgctgtccccaggcatgctactaaggtggaaacgcttgctgcagaataggttcttttacagaaagctcatattgcagctccccaaattctccatttcaaattcctatgaattggatgagattttgcctgacttgggcttccaggatctgttcaccccaaatgccaacttctcaaatatcagcaaaaaggagaaattgtacttatccaaagttttccataagaccgtcctggatgtgaatgaagttggcacaaaggcagcagcagccaccggctcctttgccacctttttctctgcccagcccaagaaacgttaccttatattcaaccggcccttcttggtgatattgtattccaccagctcccaggatatcctcttcatggggaaggtggtcaaccccacagcatagcagacctaggattaggtggtctgttaccagcaggagaacgtgactgggtaggcctggatatgaataactctgcacccatggcttggggtgggaaagggcccctgactcccaagagtggtagagggaggcgtggggctagatggactggaaagtgggagatacctccctggggaccacgctgattaaaccaaatggcatctctgaaaaaaaaaaaaaaaaaaaaaaaaaaa

SEQ ID NO: 911 - DNA, 1405 bp, Homo sapiens
gaattcccagggcaagctccaggctccgcaagacccgcgggcctccaggatgcagacaccgcacaaggagcacctgtataagctgctggtaatcggcgacctaggtgtaggcaagaccagcatcatcaagcgctacgtgcaccaaaacttctcctcccactaccgggccaccattggtgtggacttcgcgctgaaggtgctccactgggacccagagacggtggtgcgcctgcagctctgggacatcgcaggtcaagaaagatttggtaacatgacaagagtctattaccgagaagctatgggagcatttattgtttttgatgtcaccagaccagccacatttgaagcagtggcaaaatggaaaaatgatttggactcaaagttaactctccctaatggtaagccagtatcagtggttttgttggccaacaaatgtgaccaagggaaggatgtgcttgtgaacaatggactcaagatggaccagttctgcaaggagcatggtttcgtaggatggtttgaaacatcagccaaggaaaatataaacattgatgaagcgtcaagatgcctggtcaagcacatacttgcaaatgagtgcgacttcatagagtctatagaaccggacattgtgaagccccacctcacatcacccaaggttgtcagctgctctggctgtgccaaatcctagaaggcacctctgctggcatatgacagaaagaacccgtggccctcatgaatcgtgcttcagtttttccttatccattttgggtaagcatcaggatagggaagcacacgtgacaagccaaagataatatgactctatgtttcctgtcaaagaggaacagcaaatgttctttatgtgtttttccccaccgtcagcacagtgtttacaagcttttaaaatattagtctgttgcaatatgctgttttatcactgagcaaagtcactcagggacacagacagccttggtattcattcctttaaatcaacaaaagcttctggtcttcttgagaaggggactaagagagcaaggcagaggtcaagctaagtgtggggatttatcttgccctggtgcgtctttgttcaggtatcaatttgttcctgggtggtctgataggtctattaaataggaacactattttttccattcatggcagacctaagggttgcctgtgatgtttctcttcagagtcgtgtgcacaggcagcctgggcttttgttgttacttgctgtgccctgaatgctggtttaactggaaactgtatggaaagatctgctccctgtatgtgcctttctttcagctttctctgactcaaactgcgggactgctctgtacatgtaagatatattatatatatttttcacaagtgaaaaataaaacattaaaagtgttctttcccggaattc

SEQ ID NO: 912 - DNA, 4701 bp, Homo sapiens
gaattccggccttttgtggcagcaaattatagattgattgaggagagttcaggggctgagggctcagacctacccttccctgcccctgtccaccatgaggagaaaccagctgcccataccagtctttcttttactgctcctgcttcttcccagagatgccaccgcagctactggaaaaccacgatatgtggtgctggtcccctcagagctctatgcaggagtccctgaaaaggtctgtgtccacctcaaccacctgaacgagactgtgacactcaacgtaactctagagtatggagtacagtactcaaacctcctcatagaccaggctgtggataaggactcctcctactgcagctctttcacgatctcaaggccgctttcaccctcggctctcattgctgtggagataaaaggaccaacgcaccacttcataaagaagaagtcaatgtggataacaaaagctgagagcccagtctttgtccagacagacaaacccatatacaaacctggacagacagtgaaattccgagttgtctctgtggacatcagttttcgcccggttaatgaaacgttccccgtcgtttatattgagaatcccaagaggaacagaatctttcaatggcaaaatgtcgatctaccaggaggactgcaccagctctctttcccactgtctgttgagccagctctaggcatctacaaggttgtagtgcagaaggactcagggaagaaaatagaacattcctttgaggtgaaggaatatgttttacccaaatttgaggtgcaagtaaaaatgcccaagacgatggctttcctggaagaggaacttgttgtaactgcttgtggcttatacacatacggaaagcctgttcctggtctggtgacaatgaaagtatgcagaaaatatacacagtcctactccaactgccatggccaacactcgaaaagtatctgtgaagaattcagcaaacaggcagatgaaaaaggatgtttcagacaagttgtaaaaaccaaagtgttccagcccagacagaaaggctatgacatgaagatagaggtggaagccaagatcaaagaggacggaacaggaatagaactaactggtactggatcatgtgaaatcgcaaataccttaagcaaactgaaatttactaaagcgaatacattttacaggcctgggctgcctttctttggacaggttcttcttgttgatgagaagggtcaaccaatccccaacaaaaatctaactgtccaagtgaattcagttaggtcccagttcacttttactaccgatgagcatggcttggccaacattctcatcgacaccaccaacttcacgttttcgtttatgggaatcagggtcatctacaagcagaacaacatctgctttgataactggtgggttgatgaatatcacacacaggcagatcattctgcagctcgcatcttttccccaagccggagttatattcaacttgaacttgttcttggtactttggcttgtgggcaaactcaggagattcggatacacttcctcttgaatgaagatgccctgaaagatgcaaaagacttaaccttttactacctgatcaaagcaaggggaagcatctttaactcaggaagccacgtgtttccgcttgaacaaggaaaagtgaaaggagtagtttccttcccaattcgagtggagccaggcatggctcctgtggctaagctgattgtctacactattttacctaatgaagaacttattgctgatgttcagaaattcgacattgaaaagtgttttgccaatacggtgaatttgagtttcccatcagcacagagcctgccagcctctgacacccacctgacggtcaaagccacacctctgtccctgtgtgccctcactgcggtcgaccagagtgtgctgctactgaagcccgaagccaagctctctcctcaatcaatctataatttgctgccacaaaaggctgagcagggggcttacttaggacccctaccgtacaaaggcggtgagaactgcatcaaagcagaagacatcactcacaacggcatcgtgtacacaccaaagcaggatctgaacgacaatgacgcatacagcgttttccagtccataggattaaaaatttttaccaacaccagagtccacaaaccacgctattgtccaatgtatcaagcctatccgcctttgccctacgtaggagagcctcaagccttagctatgtctgcaatcccaggagccggctacagatcaagcaacattaggaccagctcaatgatgatgatgggcgcatcagaagtagctcaggaggtagaagtaagagagacagtgcggaagtacttcccggaaacctggatctgggacatggtgccgctggacttatccggtgacggtgagttgccggtaaaggtccctgacaccatcactgagtggaaggccagtgcattctgcttgtctggaactactggccttggtctctcctccaccatctcccataaagtcttccagcccttcttcctggagctcactctcccctactctgtggttcgaggcgaagcatttatcctcaaagctaccgtactcaactacatgcctcactgcattcggatccatgtgagcctagagatgtctcctgatttcctggcagtccctgtggggagccatgaagattctcattgcatctgtggaaatgaaagaaaaaccgtgtcctgggctgtgaccccaaagtcgctgggggaggtgaacttcacagctactgcagaagctttgcagtctccagaactgtgtggcaataaggtggcagaagtgccagcccttgtacagaaggacactgtagtgaagcccgtaatagtcgagcctgaaggaattgagaaggaacaaacgtacaacacactgttatgcccacaagatgctgagttacaggaaaattggacactggatcttccagccaatgtggttgaaggatctgccagggctacacagtccgttttgggcgatatactaggctctgcgatgcaaaacctccagaatcttctccagatgccctatggctgtggggaacaaaacatggtcctcttcgtccctaacatctacgttctggagtatctcaatgagacacagcagctgacagaggcgatcaagtccaaggccattagctacctcatcagcgggtaccagaggcagctgaactatcagcacagtgacggttcatacagcacattcggggaccgcggtatgaggcacagtcagggaaacacttggctcactgcatttgtgctcaaggccttcgctcaagctcagtcatacatctatatagaaaagacacacatcacaaatgctttcaattggctctcgatgaaacaaagggagaacggttgtttccaacagtctggatccctgctcaacaatgcgatgaagggtggtgtggatgatgaagtgacactctctgcctatatcaccattgctctgctggagatgcccctgcctgtcactcacagtgttgttcgtaatgctctattctgcctggaaacggcctgggcctccatctcaaacagccaagaaagtcatgtctacacaaaagcactgctggcctatgcctttgccctggcaggaaacagagccaagcgaagcgaggtgcttgaatccctaaacaaagacgctgtgaatgaggaggaatcagtgcactggcaacgtcctaagaatgtcgaggaaaatgtccgggaaatgaggtccttctcttataaaccgcgggccccttctgctgaagtggagatgacagcttacgtgcttctcgcctacctcacctctgcatcttcccggcctacgcgagacctttcttcatcggacctgactacagcatccaagattgtgaagtggatcagcaaacaacaaaactcccatggggggttctcctccactcaggatacagtggtggctcttcaagccctctccaaatatggagcagccacttttacgaaaagtaataaagaagtgtcggtcaccatcgagtcttcagggaccgtctctgggactctccatgttaacaatggcaatcgcctgctgctgcaggaagtcaggctggcagatctgcccggaaattacatcaccaaagtgtcagggtcaggatgtgtgtacctccagacatctctaaagtacaacatccttccggaggcagaaggagaagcgcccttcactctgaaggtcaacactctccccttaaactttgataaggcagaacatcacagaaagttccagatccacatcaacgtaagctacattggagaacgacccaactccaacatggtcattgttgatgtgaagatggtgtcaggcttcatacctgtgaagccatccgtgaaaaagctccaagaccagtctaacattcagaggactgaagtgaacaccaaccacgttctaatctacattgaaaagctaaccaatcaaaccatgggtttctccttcgcggtggaacaagacattccagtaaagaacttaaaaccagccccagtaaaagtctacgattattatgagacagatgaattcgccattgaagaatacagtgcccctttcagttctgactctgaacaaggaaatgcttaaaaataggaacctatagatttcctcagaaagactcctccacacgtgaagaaccaagacagcaagataaatggaaaggaattaaaaacccataaaatttatatgtt

SEQ ID NO: 913 - DNA, 1587 bp, Homo sapiens
cgcaggttgtggctgcacacactcgtcaaaatgaagattgaggaggtgaagagcaccacgaagacgcaacgcattgcctcccacagccacgtgaaggggctggggctggatgagagcggcctggccaagcaggcggcttcggggctcgtgggccaggagaacgcgagagaggcatgtggtgtcatagtcgaattaatcaaaagcaagaaaatggctggaagagctgtcttgttggcagggcctcctggaactggcaagacagccttggccctggctattgctcaggaactgggcagtaaagtccctttctgcccgatggtgggtagtgaagtatactcaactgagatcaagaagacagaggtgctgatggagaacttccgaagggctattgggctgcggataaaggagactaaggaggtttatgaaggggaggtgacagagctcactccctgtgagacagagaaccccatgggtgggtatggcaaaactatcagccacgtgatcatagggctcaagactgccaaaggaaccaaacagctgaagctggaccccagtatttttgaaagtttgcagaaagaacgagtagaggctggagatgtgatttacattgaagcaaacagtggagctgtgaagaggcaaggcaggtgtgacacctatgccacagagtttgaccttgaggctgaagagtatgtccctttgccaaagggagatgtgcacaagaagaaggaaatcatacaggatgtgaccttgcacgacttggacgtggccaatgcgcggcctcagggtgggcaagatattctgtctatgatgggccagttgatgaagccaaaaaagacagagatcacagataaacttcgaggggagatcaacaaggtggtgaacaaatacattgaccagggcgttgcagagctggtccctggagtgctctttgttgacgaggtccacatgctggatatcgagtgctttacctacctgcaccgagccctggagtcctccatcgcccccattgtcatctttgcatccaaccgaggcaactgtgtcatcaggggcaccgaggacatcacttctccacacggcatcccgttggacctgctggaccgggtgatgatcatcaggaccatgctgtatacgccacaggagatgaagcagatcattaagatccgagcccagacggaaggcatcaacatcagtgaggaggccctaaaccacctcggggagattggcaccaagaccacgctgaggtattcagtgcagctgctgacccctgccaacctgctggccaagatcaacgggaaggacagcattgagaaggagcacgtggaggagatcagcgagctcttctatgacgccaagtcctccgccaagattctggccgaccagcaggacaagtacatgaagtaacgtagggtttggaggtgcacccagaggacagaccccacaccgaggacagggtcttgcgttgagcatgctttgcagtgttacagtttgtttgtaaattatcaaacctccaaggttgtttggaaggaaccctttcccacctagcttgtttttctaataaaactgaatcttattttgatgataaaaaaa

SEQ ID NO: 914 - DNA, 2101 bp, Homo sapiens
agcagccttatatgtatcaagatgcattttattaagtcttcatgggtatctggggaagaataaattgtttgtttggcctgagcaccaattagtgtccacatctctgagaaagaacatggatctacaactatccgtgaaagcccaatgcatgggggcaacatcaattagtactcgtgccgaattcggcacgaggggagctcagcacgttcagccctgcaaagggcagtacacaaaattgagagtaaagctcgaagagagacttgtttaaagaaaacggcaatggatttgatcccaaacttttccatggaaacctggctgctcctggttatcagcctggtgctcctctacctatatggaactcattcacatggaatttttaaaaagttgggaattcctgggcccaaacctttgcctttcttggggacgattcttgcttacaggaagggcttctgggaatttgacaaatactgccataaaaaatatgggaaattatgggggttgtacgatggtcgacagcctgtgctagcgatcacggatccagacataatcaaaacagtgctggtgaaggaatgttactctaccttcacaaaccgacggaactttggtccagtgggtattttgaaaaaagccatctccatctctgaggatgaagaatggaagagaattcgagccctgctgtctccaaccttcaccagtgggaagctcaaggagatgttccccatcattaaccagtatacagatatgttggtgagaaacatgaggcagggatcggaggaaggcaagcccaccagcatgaaagacatctttggggcctacagcatggatgtgatcacagccacctcatttggagtgaatgttgattcccttaacaacccacaggacccttttgtggaaaaagtcaagaagctcttaaaatttgatatctttgatccattgttcctctcagtgacactttttccattccttaccccactatttgaagcactaaatgtctccatgtttccaagagatgtcattgacttttttaaaacttcagtagaacgaatgaaagagaatcgcatgaaagagaaagaaaagcaaagaatggactttcttcagctgatgataaactcccagaattccaaagtcaaagactctcataaagcattatccgatgtggagattgtggcccagtcagttatcttcatttttgccggctatgagaccactagcagtgctctttcctttgttttgtatttgctggccattcaccctgatatacagaagaaactgcaggatgaaattgatgcagctctccccaataaggcacatgccacctatgataccctgctacaaatggagtatctagatatggtggtgaatgaaaccctcagattatatccaattgctggaaggcttgagagggtctgtaagacagatgttgaaatcaatggggtgttcattcccaaagggactgtggtgatgataccaacctttgctcttcacaaagacccgcattactggccagagcctgaggaattccgccctgaaaggttcagcaagaagaatcaggataacatcaatccttatatgtacctgccctttgggaatggacccaggaactgtattggcatgaggtttgctctcatgaacatgaaagttgctcttgtcagagtcctgcagaacttctccttccaaccttgtaaggaaactcagatccctttaaaattgagcaaacaaggacttcttcaaccagaaaagccactgcttctaaaagttgtgtccagagatgagactgtgaatggagcttgatgtagaatggcctatagtggtgttgtatcacatggaccagaaaccagttcatattgtgaatgaatccagagatgaagattgcagtaattttgttcactcctgggggttttgggtgttctttgagctttctcagcctctgtgcaagttgttttctgtggaacataaggatctaatgacataaatccaagataaatatattcaactcgtggttcttgtgggatggcctatgttaccttcattgttaccaccaaatactctgatttctgatgagaaaataaataaacatcaattactagttctatcaccatta

SEQ ID NO: 915 - DNA, 2036 bp, Homo sapiens
gcagagtatcagaggcccagctagagggagaacaccgaggagtaatttgctgacagacaagcagggatggacctgctttcagctctcacactggaaacctgggtcctcctggcagtcatcctggtgcttctctaccgacttggaacccatagacatggaatttttaagaaacaaggaattcctgggccaaaacctctgccctttttaggcactgtgctgaattactacaagggcttagggagatttgacatggagtgctataaaaagtatggaaaaatatgggggttgtttgatggtcaaacgcctgtgtttgccatcatggacacagagatgattaagaatgtactagtgaaggaatgcttttctgtcttcacaaaccggcgggattttggcccagtggggattatggggaaagctgtctctgtagctaaggatgaggagtggaagagatatagagccttgctgtcccccacgttcaccagtggaagactcaaggagatgttccccatcattgaacagtatggagacattttggtaaagtacttgaagcaagaggcggagacaggcaagcctgtcaccatgaaaaaagtgtttggtgcctacagcatggatgtgatcaccagcacatcatttggagtgaacgtcgattcccttaacaacccaaaggatccttttgtggagaaaaccaagaaattgttaagatttgacttttttgatccgttgttcttgtcagtagtactctttccattcctcaccccaatatatgagatgctaaatatctgcatgttcccaaaggattcaatagcatttttccaaaaatttgtgcacagaataaaggaaacccgtctggattctaagcataagcaccgagtggattttctccagctgatgctgaacgctcataataattccaaagacgaagtgtctcataaagccctgtctgatgttgaaatcatagcccagtcagttatctttatttttgctggctatgaaaccaccagcagcacactctcctttgtcttgtatttcctggccactcaccctgatattcagaagaaactgcaggaggagatcgatggggccctgccgagtaaggcacctcctacctacgatattgtgatggaaatggaatacctggatatggtgttgaatgaaactctcagattgtatccaattggtaatagacttgagagagtctgtaaaaaagatatagaacttgatggtttgtttatacccaaagggtcagtagtgacgattccaacatatgctcttcatcatgacccacagcactggccaaagcctgaggaatttcatccagaaaggtttagcaaggagaacaagggaagcattcatccttatgtatatctgccctttggaaatggacccaggaactgcattgacatgaggtttgctctcatgaatatgaaactcgctctcactaaagttctgcaaaacttctccttccagccttgcaaggaaacacagatacctctgaaattgagtagacaagcaattcttgaaccagaaaaacccattgttctaaaggttctgccacgggatgcagtcataaatggagcctgactttccctcaaggaattttattgggatcttcacaaaggcagtgtctaagaacattgaaccttttaatttacttactgaattgaattcagataaaactgggacttaattgactgctcttgatgcatggttaaagatttggtacatttatggatctttctaagtgtctatacgaagtaccacataataaaaaggagttggcaaggtctgtgatggaacaggaaattcacctttgctgattctcatgggaccatctccatccacatctggtggtctctgttaatttcttttgagctcttttgatagtaaccatgtcctcgtcctttgatcaataatactttgatgtaaaggtgaactattgtggtaattctatttgtagatttggtatcagatgtttttcattgcaatattctagaataaatgctacatggaaagtaaaaaaaaaatccccaggggca

SEQ ID NO: 916 - DNA, 2040 bp, Homo sapiens; identical to SEQ ID NO: 370

SEQ ID NO: 917 - DNA, 1819 bp, Homo sapiens
actgtgaacagtaaggattttgatttttaagatgcctgggaagtggatttctgctcttctcctgctacagataagttgctgtttccaatctgggaactgtgggaaggtgttggtgtggccgatggaattcagccactggatgaatataaaaacaatactggatgaacttgtacagaggggccatgaagtcactgttctgaaaccttcggcttactatgttcttgatccgaaaaaatcgccagatcttaagtttgaaactttccctacatctgtcagtaaagatgaactggaaaattatttcataaagcttgtggatgtgtggacttatgagttgcaaagagatacatgtttgtcttattctcctttactacaaaatatgatagatggattttctgattactatctaagtctttgtaaagacaccgtttcaaacaagcagctcatggcaaaactacaggaatccaagtttgatgttcttttgtcagatcctgtggctgcctgtggggagctgatagccgaagtgctccacattccttttctgtacagtcttcgcttctctccaggctacaaaattgaaaagtccagtggaagatttatattacctccatcttatgtaccagtaattttgtcaggaatgggtggcccaatgacattcatagacagggtaaaaaatatgatatgtacgctttattttgacttttggttccatatgtttaatgccaagaaatgggatccattttacagtgagattttgggaaggcccaccaccttagctgagacaatgggcaaagcagaaatgtggctcattagatcctactgggatttggaatttccccacccaacattaccaaatgttgactatattggaggactccaatgcagacctcctaaacccttgcccaaggatatggaagattttgtccagagctctggagagcatggcgtggtggtgttttctctggggtcaatggtcagcagcatgacagaagaaaaggccaatgcaattgcatgggcccttgcccagattccacaaaaggttctttggaaatttgatggcaaaaccccagcaaccttaggacccaataccagagtctacaagtggcttccccagaatgacctccttggtcatccaaaaaccaaagcctttgtaactcatagtggagccaatggtgtctatgaggccatctatcatggaatccctatggttggcattcctatgtttggagaacaacatgataacattgcccacatggtggccaaaggagcagctgttacactgaatatcaggacaatgtcaaagtcagatttgttcaatgcactaaaggaaataataaacaatccattctataaaaaaaatgctgtgtggttgtcaaccattcaccatgaccaacctatgaagcccctggacaaggctgtcttctggattgagtttgtcatgcgccacaaaggggccaagcacctgaggccacttggacatgaccttccctggtaccagtaccactctctggatgtgattggattcctgctcacctgttcggcagtcattgcagtccttactgtaaaatgcttcttgtttatttaccgactctttgtgaagaaggaaaagaaaatgaagaatgagtagagctcatttacaatgcactacaggaatgaaatttcagcctcattctaatttatgaatcaccttcttaacacttcctgattatttttttgtcaaggcagatcatctttgtaagaagacatataactccgtaaatactgatatgttatcaaaaattccatcattcataaattttaatagcacttaatataaaaatat

SEQ ID NO: 918 - DNA, 1782 bp, Homo sapiens
gcgattggctggttcagcccagctcaacttcccgcacagcttccggcaagtcggaagccagggacaaaaagttttcaaagaagataggaggttgtggaggactcgctgctcatgagagaaggatgctacaactaagcctgtcccggctgggaatggggtccctgacagcctctccatggcatctactgctgctgggaggagcctcttggatactagcccgaattctggcctggatctataccttctatgacaactgctgccgccttcgttgcttccctcagccccctaaaccaagttggttttggggtcacttgaccttgatgaagaacaacgaggaaggcatgcagttcatagcacatctgggccgcaacttccgtgatatccacctctcttgggtgggacccgtgtacccgatcctgcgactcgtccaccctaacgtcattgctcccctgctccaagcctcagctgctgttgcacccaaggaaatgaccctctatggcttcctgaagccctggctgggggatgggctcctgatgagcgctggtgagaagtggaaccaccaccgacgcctgctgacacccgccttccactttgacatcctgaagtcctacgtgaagatttttaacaagagcgtgaacaccatgcatgccaagtggcagcgtctgactgccaagggcagtgcccgtctggacatgttcgagcacatcagcctgatgaccttggacagcctgcaaaaatgcatcttcagcttcgacagcaactgtcaggagtctaacagtgaatacatagctgcgatcctggaactcagctccctcatagtgaaacggcaacgccagcccttcctgtacctggacttcctgtattacctcactgctgatgggcggcgcttccgcaaggcctgcgacgtggtgcacaacttcacagatgctgtcatcagggagagacgcagcaccctcaatacccagggcgttgatgaattcctaaaggccagggctaagactaaaactttagactttattgatgttctcttgctggccaaggatgagcatgggaaggggctgtcggatgtggacatccgagcagaggctgacaccttcatgttcggaggtcatgacaccacggccagcgcactctcctggatcctgtacaacctggcaaggcacccggaataccaggagcgctgccggcaggaggtgcgggagctgctgagggaccgagagcctgaggagattgaatgggacgacctggcccagctgcccttcctaaccatgtgcatcaaggagagtctgcggctgcaccctccagtcttattaatctcccgctgctgttcccaggacattgtgctgccagatggccgggtcatccccaaagggaacatctgtgtcatcagcatctttggggttcaccacaatccttcagtgtggccagaccctgaggtctacaaccccttccgctttgacccagaaaacccacagaagaggtcacctctggcttttattcccttctcagcgggacccaggaactgcataggacagactttcgccatgagcgagataaaggtggcgctggcgctgacgctgctgcgcttctgcgtcctgccagatgacaaggagccgcgccggaagccggagctgatcctgcgtgcggagggcggactgtggctgcgggtggaaccgctgagcacagtgacctcacagctgccttgggacctcctcgcccaccctcctacctcttgagatctctgaataaagaattaaataagaaaaaaaaaaaaaaaaaaaa

SEQ ID NO: 919 - DNA, 2002 bp, Homo sapiens
taggggacgccaggctgactgttgatcatggcttccagccacaatgtgttgatgcggctggtagcctccgcatactctatcgctcagaaggcaggaaccatcgtcaggtgtgtcatcgctgaaggagacctgggcatcgtgcagaagacctcagccactgacctgcagaccaaagcagaccgcatggtacagatgagcatatgctcttccctgtcccggaaattcccgaagctgacgatcatcggggaagaggacctgcctcctggagaagtggatcaagaactgattgaagacgggcagtcggaggagatcctgaagcagccgtgcccatcgcagtacagtgcaatcaaggaggaagaccttgtggtttgggttgaccccgtagatggtaccaaggaatacactgaaggtcttcttgacaatgtaacagtgctcattgggattgcttatgaaggaaaggccatcgcaggcatcatcaaccagccatattacaactaccaggcaggaccggacgccgtgctgggcaggaccatctggggagtcctgggtttgggtgcctttgggtttcagctgaaagaagcccctgctgggaagcacatcatcaccaccaccagatcccatagcaacaagctggtcacagactgcattgcagccatgaaccctgacaacgtgctgcgagtgggaggagcaggaaacaagattatccagctgattgaaggcaaagcctctgcttatgtatttgcaagtcctggatgtaagaaatgggatacttgtgccccagaagttatcttacatgctgtaggagggaagttgacagacatccacgggaatcccctgcagtacgacaaggaggtgaaacacatgaactctgctggagttctggctgcactgcggaattatgagtactatgcaagccgcgtaccagagtctgtcaaaagtgcactcattccctgaaggggtctcacttacttacccaggggcctcggttcaaagtaacatatcttagaactgattaactgattgaacaattagaactccacttgcattcatcattgatcaatgatttattagtaggtagggatagaagatggaattaaagaattgtcttaggtatataacacaattgtcatttctcctgcctaaaaaaaaaaaaattagccaagtggtagcacttatgacagtcatggccattccagtggctgagctaggagggttgcttgagcccagggccccgagactagcctccttcacatagcaagacatagcccaaaaacaaagaagaaaaacaaaaaaggaatttacacttgatcttagccaaaaggccgagaagcgatcaaaaaaggaatttagttttaccaattagctaactagacctgttttgttgttgatgttgttgttgtttggttttttgagacagggtttctctgtgcagtcctggctgtactgaaatttacttagtagacaaagctggccttgagctcagtgattcccctgcttctgcctcctgagggcagggattaagggcttgccccaccatacctggcagaaatgttactgtttttaagtgaagaaatgaaaaagggttagttctgaatgacagtccaggtcatttgtggaatcaacattcctgctggtaaccagatttcttcagggcacagttactccagaatttcagtttgttttcttttcatggtaatgttttaaatttctgattccaaatgagaatgcatataatattatttatgttgatagatttatggggaaagtttgtccaagatacttagtcctatctctttatgttatatatcagatttttttcaaaagtatttgaaaattataaatactgtgaggattaatttattctcttgccattaaaagctatcatcagaaaaaaaaaaaaaaaaaattcctgcggccgcgaattcttccctttagagcacactggcggccgctctagaactagtggatcccccgggctgcaggaattcgatatcaagcttat

SEQ ID NO: 920 - DNA, 3751 bp, Homo sapiens
agaaagagagctacagactccgcgcgctccggaagaccgggtcgtagagctcgagacaactcccgccagcagcaagacacgggagacccaaccaggatgacaaccctccccaggccgcccgctccatggaacaccagctcctgtgctgcgaagtggagaccatccgccgcgcgtaccctgacaccaatctcctcaaccgaccgggtctgcgagccatgcttaagactgaggagacctgcgcgccctccgtttcttacttcaagtgcgtgcagagggagattgtgccatccatgcggaaaatcgtggccacctggatgctagaggtctgcgaggagcagaagtgcgaagaggaggtcttcccgctggccatgaactacctggaccgtttcttgtctctggagcccctgaagaagagccgcctgcagcttctgggggccacctgcatgttcgtggcctctaagatgaaggagaccattcccctgactgccgagaagttgtgcatctacactgacaactctatccgccccgaggagttgctgcaaatggaactgcttctggtgaacaagctcaaatggaacctggccgccatgactccccacgatttcatcgaacacttcctctccaaaatgccagaggcggatgagaacaagcagatcatccgcaaacatgcacagacctttgtggccctctgtgccacagatgtgaagttcatttccaacccaccctccatggtggctgctgggagtgtggtggccgcgatgcagggcctgaacctgggcagccccaacaacttcctctcctgctaccgcacaacgcactttctttccagagtcatcaagtgtgacccggactgcctccgtgcctgccaggaacagattgaagcccttctggagtcaagcctgcgccaggcccagcagaacatcgatcccaaggccaccgaggaggaaggggaagtggaggaagaagctggtctggcttgcacacccaccgacgtccgagatgtggacatctgagggcccaccgggcaggcgggagtcaccaagtagtggcatccgcgaagagaaaggagccagcccgggtgctcctgacgaggtcccccttggggatgtgttgttaccagaaggggaagttttgttctctttgttggttgtttttccttaatctttctcctttctatctgatttaagcaaaagagaaaaaaatacctgaaagctgtcttaaagagagagagagagatagaattcgcatcaccctgagtatagggagacgggggggtgcctacaaaaatagaattctgtaccccagtaatcaactagttttctattaatgtgcttgtctgttctaagaataggattaacacacaggaagtcttgagaaggatttttgattcttttatgtgtttaagaaaaaaaagcttaagaaacattgctttaaaaaaagaaggaaaaaaaatacagcaaaccattgttaaagtagaagggttttaggtagagaaatgtactctgctttggtgaaaaggcacagatttgggaaggtcctcaacctcactcccctgcttgttcagtgcctacagacctgttacctgatgatacctgtgctttatcccaggagtggggcagacctcttaaccttactgatggtcgattcgacctctagcgggctcgtgggtgtggcaacctccagggctcatgttatgggccctctgccccccacaacctgcaggttcacagagcgccagccagcacgcaggggtagggatgaaatagtgacataatatattctatttttggggaaccttcctgttttgggggttcctgtttagagagatgctggtttttggctggtggccctgcagcccactcaacatcaggttgaacccacagcttttcttttgtgtgtggtttgttttgttatgtttttccttctccatgttcccaaaaccattccatttcaaagcacttttggtcagctagctggaggcagtgttgctgggtgtgtgtgtgtgtgtgtgtgtgtgtgtgtgtgtgtgtgtgtgtcggtgggggagggggtctagtggaatggttggggatgtccacacactcaattctgatggctgcacagcaggtgtgtagggctggtagcatgaggtgcttgggaagttgtgttgggtcgagaagagaaagctctgttctcgtaccaccgggatcttcctgcaaagtcggagggatcttttggtgccagctggcgtttggaagtagggaccgtgatggcattacctggacaaggggattcaggacgactcttaagtctttcacacaggaggcttttaaacactaaaatctctaatttatacgtaaggctacagaagagtatttattgggaaggttgcccatgacccgtgtgactcaaagcaatgtgatcttcccttgattcaaacgcacaccttcttccctgctggcgaaggttttaggccattgtctgagagactggtcttttattggccaagtggggtgtcctccaaaaaaaccaaaccacaaagacggagatgtgggtctccttgactttcccaacccaattgcccccattggagagccatccaaacctgaggaaaattaggggaccccaaaagagtcttgagtctggcacattcttgccgccgctcccaagttagcaacagtaggtaatttgcacacctctggctctgtgcctttctgttcaggatgtgttggtgggaggtggagagcgggtggctggagaggggatgtgagagaagaagtatggagggtagggaccacacgggacagaccgcggctcctttcacagcgctgctaccaatgactcccaggatccccggcgttcggaaccagattcacgttgctttgtatctttcatgttgttttcgctgctattggagggtcagttttattttgttgttgttggtttgtttgtttttttttacaatgtcataaactgccatgttcaagttttaatttcctcgtagaagagtgtatttacagatgccctctccgggactttttctatttattgtgattcaattttggattaatgtgattaccgctgtattcccaacaaaaggtgttttccacacacacacacacacacacacacacacacacacacacacacaggttcctgtacacaatacctcatgtatcacctaacaatacataggcctgccaggcgggtggggcggtctgcctccagggaccctgggaccctgctggggatcatcctgtcatgctgggccttcatttgatctgggacatagcatcacagcagtcaggccaactgtgttctgttagttatcaatattgttacttgtagcggcctgttgtgcatgccaccatgctgctggacccggagagatttgttctgagtctctggtgcatcatataatctgttaggttctagtgttctgtcttgttttgtgttactcacagcattgtgctaatgtaaagccagccgcaatgctgtaggccccaggttccctagcaagctgccaaaccaaaagggtcaccaccagcttagctgaggcgtcccaaccaggcaggacccttgagggctgctgtgtccatggtgatggggtgaagttttggccaaagggccaaaggctggtggatccacacagtctgccctgtgacatgaatggctttgaggggctctggctggtggtcaggttggctttgtgtattctggttgacacaccatggcgcttcccagcacagacatgtgaccagcatggtccagg

SEQ ID NO: 921 - DNA, 3751 bp, Homo sapiens; identical to SEQ ID NO: 920

SEQ ID NO: 922 - DNA, 3751 bp, Homo sapiens; identical to SEQ ID NO: 920

SEQ ID NO: 923 - DNA, 1777 bp, Homo sapiens
ggcgtgcctttagccggtcagaaaagaacgcattcggcacttctacagacgcactgaggagtcagggatttgtgtttgggagaggtttacgaagaggtgctgggctggtgcgaactgtggcaggcagagcccaggagtcctgcgaggtcctgagtttggtcgcctctcacccccctccccggtagacgggccatggcgcagttcgtgttcgagagcgatttgcattcactgcttcaactggacgcgcccatccccaatgcaccgattgctcgctggcagcgcaaagcaaaagaagccacaggcccagccccctcgcctatgcgggccgccaacagatcacacagcgccggtcggaccccgggccgaactcctggcaaatctaattctaaggttcagaccacccctagcaaacctggaggtgaccgctatatcccccaacgtagtgcttcccaaatggaggtggccagcttcctcttgagcaaggagaaccagccggaagacgggggtacgcccaccaagaaggagcatcagaaagcctgggctcggaacctgaacggttttgatgtggaggaagccaagatcctcaggctcagtggaaaacctcagaatgccccagaaggctaccagaacagattgaaagtactctacagccagaaagccacgcctggctccagtcggaaggcttgcagatacattccttccctgccagacaggattcttgatgcccctgaaatccggaatgactactacctgaatcttgtcgattggagctctggaaatgtattagctgtggcactggacaacagtgtgtacttatggaacgctggttccggtgacatcctgcagctgttgcaaatggagcagcctggggactacatatcatccgtggcctggatcaaagagggcaactacctggctgtgggcaccagtaatgctgaggtgcagctatgggatgtgcagcagcagaaacggcttcgaaacatgaccagccactctgctcgagtaagctccctgagttggaacagctatatcctgtcaagtggttcacgatctggccacatccaccaccacgatgttcgagtagcagaacaccatgtggccacactgagtggccatagccaggaagtatgtgggctgcgctgggccccagatggacgacatctggcaagcggtggcaatgataacattgtcaacgtgtggcctagtggtcctggagaaagtggctgggttcccctgcagacattcactcaacatcaaggtgctgtcaaggctgttgcatggtgtccctggcagtccaatatcctggcaacaggaggaggtaccagtgaccgacacattcgcatttggaacgtctgctctggagcctgtctgagtgctgtggatgtgcattcccaggtgtgctccatcctctggtctccccactataaggagctcatctcaggccatggctttgcccagaaccagctggttatttggaagtacccaaccatggccaaggtggcagagctcaaaggtcacacagcccgggtcctgagtctcaccatgagtccagacggggccacagtggcatctgcagcagccgatgagactctgcggctctggcgctgctttgagctggaccctgcccttcggcgggagcgggaaaaagccagcacatctaaaagtagcctcatccaccaaggcatccggtgaaagacaaccctttcttttcccttcttgattttgttgttgtttatttttttctaataaagttcatatcttcctttcttgtgttcca

SEQ ID NO: 924 - DNA, 1473 bp, Homo sapiens
cgcgagcaacccgcaaaacgttgtgcattgcgttgaaaaggtgcatctggttcccgattctactccccacccgcgaccgcacacagcaaacatgacccagcagccgcctgacgttgaggaggatgactgtctttctgaataccaccacctcttctgcccggaccttctccaggacaaagtggcttttatcactggtggtggttctgggattggcttccggatcgccgagattttcatgaggcatggctgccacactgtcatcgtcagcaggagtctgccgagagtgtccgaggctgctaagaagttggttgctgccactggaaagcggtgtctccctctgtctatggatgtccgagttcccccagctgtcatggctgctgtggaccaagcgctgaaagaatttggcaaaatcgacatcctcattaactgtgctgcagggaactttttatgccctgccagtgcattgtctttcaatgcctttaagactgtggtggacattgacacccttggcaccttcaatgtgtctcgtgtgctttatgagaagttcttccgggaccatggaggagtgatcgtgaacattaccgccaccctcagtatgcgggggcaggtgctgcagctccatgcaggcgctgccaaggcggctgtggatgctatgacgcgacacttggctgtggagtggggtccccagaatatccgtgtcaacagcctggctcctggtgccatcagcggcactgagggtctgcggagattaggaggccccaaggccagttcgaaatttaagtatctttcaagtcctattccaagactcggaaccaagacagaaatcgcccacagcgtgctgtacctagccagccctctggcttcctatgtctcagggattgtgttggtggttgatggtggtagctggatgacgctcccaaatgacattgggcgactgctagagtttgaatcctcctctgctaagctgtagtgtttgaagagcacacccaaggcttcaagcatgttaaagcaacagaatcaactgaactacgtcctctaccccaggataccttttttgacacataaacattgattgcgcttaagaaagttgtactgaggaggccgtgttcttcatggggaaggcttcctgtctcacataggtctatagtcacacgaggaatgttgaatctgattgggaaatccaagcccacctgcccttcctccgggatcaagctatttccaagctctgcctctcctttgcccacatcctgagtagaaatggccggattgtgagcctagcctgatacttgcttacagtatctgaagagttactatgattttaccagaaaaaaaaaatgcactttcttgtaaaaaaaaaatcatcttttttactgtaaaaatagctgagttggaatttgtaaaagtttctagaaagaaaatttaaaagattgctgactgattctgtcactgaaaaaaaaaaaaaaaaaaaaaaaa

SEQ ID NO: 925 - DNA, 1473 bp, Homo sapiens; identical to SEQ ID NO: 924

SEQ ID NO: 926 - DNA, 4413 bp, Homo sapiens
  misc_feature (788)..(788): n is a, c, g, or t
ggcgtcttgttcctgtttcgccacagttcctaccttatgagcttggattcctcacgctaataaaagaggagcagtaaaagctggcaggctgacagaggcaacctcaggacggactttctggctactgaccattttgctgtgtcttactaggattgtgtgtggacgtgagatcaaccatgagctccgttgcagttttgacccaagagagttttgctgaacatcgaagtgggctggttccacaacaaatcatagttgccacattaaattcagaagaagaaagtgaccctccaacctacaaggatgccttccctccactgcctgagaaagcagcttgcttggaaagtgcccaagaacctgctggagcctggagtaacaagatccggcccatcaaggcctctgtcatcactcaggtgtttcatgtacccctggaggagagaaaatataaggacatgaaccagtttggagaaggtgaacaagcaaaaatctgccttgagatcatgcaaaggactggtgctcacctggagctctctctggctaaagaccaaggtctctccatcatggtctcagggaagctggatgcagtcatgaaagcccggaaagacattgttgctagactacagacacaggcctcagccactgttcccattcctaaagagcaccaccgctttgttattggcaaaaacggagaaaaactacaagacttagaactgaaaactgctaccaaaatccagatcccacgcccagatgaccccagtaatcagatcaagatcactggcaccaaagaaggnatcgagaaagctcgccatgaggtccttctgatctctgctgagcaggacaagcgtgccgtaaagaggctagaagtggagaaggccttccaccccttcatcgctgggccgtacaatagacttgtgggtgaaatcatgcaggaaacagggacgcgaatcaacatccctccacccagtgttaaccgtacagaaatcgtcttcactggagaaaaggaacagctggctcaggctgtggctcgtattaagaagatttatgaggaaaagaagaagaagactacgaccattgcggtagaggtgaagaaatctcaacacaagtatgtcatcgggccgaagggcaactcactgcaagagatcctggaacgtactggagtctccgttgagatcccgccctcagacagcatctccgagactgtgatacttagaggcgagcctgaaaagctgggacaggcattgactgaagtctatgccaaggccaacagttttacagtgtcctcagtctctgccccttcctggcttcaccgtttcatcattggtaagaaagggcagaacctggccaaaatcactcaccaaatgccaaaggttcacattgagttcacagaaggtgaggacaagatcaccctggagggccccacagaagatgtgaatgttgcccaggaacagattgaaggaatggtcaaagacctgattaatcggatggactatgtagaaatcaacattgaccataaattccacagacacctcattgggaagagtggagccaacatcaacagaatcaaagaccagtacaaagtgtctgtgcgcatcccccctgacagcgagaagagtaacctgatccgaattgagggagacccacaaggtgtgcaacaggccaagcgggagctgctggagcttgcttctcgcatggaaaatgagcgcaccaaggatctaatcattgagcaaagatttcatcgcacaatcattgggcagaaaggtgaacggattcgagaaattcgtgacaaattcccagaggtgatcatcaactttccggatccagcacaaaagagtgagattgttcaactcagaggccccaagaatgaggtggagaaatgtaccaagtacatgcagaaaatggttgcagatctggtggaaaatagctattcaatttctgtaccgatcttcaaacagtttcacaagaatatcattgggaaaggaggtgcaaacattaaaaagattcgtgaagagagcaacaccaagattgaccttcctgccgagaacagcaactcggagaccattgtcatcactggcaagcgagccaactgtgaagccgcccggagccggatcctgtccatccagaaagatctggccaacatagctgaggtggaggtctcaatccctgccaaactacacaactctctcattggcaccaagggtcgtctgatccgctccatcatggaggaatgtggtggcgtccatattcactttcctgtggaaggttctggtagtgacactgttgtcatcaggggtccttcctcagatgtggagaaggccaagaagcagcttctgcacctggctgaggagaagcaaaccaagagttttactgtggatatccgggccaagccagaataccacaaattcctcattggcaaagggggaggtaaaatccgcaaggtgcgcgacagtactggagcccgcattatatttccggctgctgaggataaggaccaggacctgataacaatcataggaaaggaagatgctgtccgtgaggcacaaaaggagctggaagcattgatccagaacctggataatgtggttgaagactacatgctggtggaccccagacaccaccgccattttgttatccgaagaggacaggtattacgagagattgctgaagaatatggcggggtgatggtcagcttcccacgctctggcacacagagtgacaaagtcactctcaagggtgccaaagactgtgtggaggcagccaagaagcgaattcaggaaatcattgaggatctggaagctcaagtaacgctggaatgtgctataccccagaagtttcatcgttcggtcatgggtcccaaaggttcaagaatccagcagatcactcgggactacaatgttcaaattaagttcccagacagagaggaaaacccagttcacagtgtagagccttccatccaggagaatggagatgaggctggagagggcagagaggccaaggagaccgacccgggatctcccaggaggtgtgacatcatagttatctctggccggaaagagaaatgtgaggctgccaaggaagccctggaggcactggttccagtcaccatcgaggtagaggtaccctttgatcttcaccgctacatcattgggcagaaaggaagtggaatccgcaagatgatggatgagtttgaggtgaatatacatgtgccagcccccgaactgcagtcacacaccattgccatcactggccttgcagcaaatttggacagggctaaggcggggctactggatcgagtaaaggagctgcaggctgagcaggaagatcgggctttaaggagttttaagctgagtgtcactgtagaccccaaataccatcccaaaattatcgggggaaaaggggcagtgatcacacagatccgattggaacatgatgtgaacatccaatttcctgataaggacgatgggaatcagccccaggaccaaatcaccatcacagggtatgagaagaacactgaagctgcccgtgatgctatcctgaaaattgtgggtgagcttgagcagatggtttctgaggatgttcccttggatcaccgtgtgcatgcccgaatcattggtgccagaggcaaagccatccggaaaatcatggatgagttcaaggtggacattcgcttcccacagagcggagctccagaccctaactgcgtcactgtgacaggactcccggagaatgtggaggaagctatcgaccatatcctcaacctagaagaggaatatctggctgatgtggtggacagtgaggcgctgcaagtttacatgaagcccccagcacatgaagagtccaaggcaccatccaaaggctttgtggtgcgagatgctccctggacctccaacagcagtgagaaggctcctgatatgagcagctctgaagaaattcccacctttggggctcaagtggcccccaagaccctcccgtggggccccaaacgataatgatcaaaaagaaactttccagcctgctgcccaaacccaaccacacaatggtttgtctcaatctgactcagcagctggaccctcgtaaattgttgatgctccccctccccgaagtctcgcagcaaagcctggtgggctggccttctgtggctgcttcccctggcctggtcagcacccgcaggctcagggtctgctcctgacgctgtgctctgggaaagtgcacgccactgcgtgaaacactaagcaaggtaatcgagcatttcgtgatcacagactccagcttcctggtccacccagcatgtagtcagcattctgactttcacagcagagttccacagcggctaggagttgacttccttgtgtcatgacctcaggaaataaatttccttgactttataaaagccaaaaaaaaaaaaaaaaaaaaaaaaaa

SEQ ID NO: 927 - DNA, 1892 bp, Homo sapiens
cgggcgggcttagctggtaccaggatggcggcggccctggcgtgggtcctggcggcgcctggtgcgagttcctgagctgctaccaggcaggtgacacttcctgtagcccccagcatgcgggcaggactgggtcccatcatcacactggccctagtgctggaggtagcatgggcctcggagcttaagcccacagcgccgcccatcttcaccggccgaccctttgtggtagcatggaatgtacccacacaagaatgtgctccgcgccacaaagtgcccctggaccttagggccttcgatgtggaggctacacctaacgagggttttttcaaccagaatatcaccaccttctactatgaccgtctaggcctgtatccacgttttgatgcagctgggatgtctgtgcatggtggcgtgcctcagaacggtagcctctgtgcacacctgcccatgctgaaggaagctgtggaacgctacattcagacccaagagcctgcggggctggcggtcattgactgggaggaatggcgaccagtgtgggttcgaaactggcaggagaaagatgtgtaccggcagtcttcacgccagctggtggccagtcgacaccctgactggccatcagaccgaatagtgaagcaggcgcagtacgaattcgagttcgctgctcggcagttcatgttgaacacactccgttacgtcaaggcagtcagacctcagcacctgtggggcttctacctctttcctgactgctataatcatgattacgtacagaactgggatagctacacaggccgctgtcctgacgtggaggtggcacaaaatgaccagttggcctggctctgggctgaaaatacagctctctttccctccgtgtacctggacaagacgctggcatcctccaaacacagccgcaactttgtcagcttccgtgttcaggaagcccttcgtgtggctcacacccaccatgcaaaccatgcactccccgtgtatgtcttcacgcgtcccacatatacccgaaggctcacagaacttaaccagatggacctcatctctaccatcggtgaaagcgccgccctgggctcagctggtgttatcttctggggcgactcagtgtacgcttcaagtatggaaaactgccagaacctcaagaagtacctaacgcagacgctggtcccctacatagtcaatgtgtcctgggccacccagtactgcagttggacccagtgccatggccatgggcgctgtgtgcgccgcaatcccagcgccagtaccttcttgcacctcagtcccagcagcttccgcctggtgcctggccgcacgcccagtgaaccccagcttcgacctgagggggagctcagcgaagatgacctcagctacctgcagatgcactttcgctgccactgctatctgggctggggtggtgagcagtgccagtggaaccataaacgggcagctggggatgccagtagagcctgggctggagcccacctcgccagtctcctgggtttggtagctatgactctcacctggaccttataagggatctctccccgcagatagcagtccagctggcctctggcacaaggatctccttggcacaaggagcctgttagggggtaggcaaatgagtctggagttggagtgggcagtacccccaggatgcctagaagagcatccataccacctgtcacccccctgttctaagggggagagaaacatcccctgagatgccctcatcttgccagagaagacgaggatacagttaggccggggaaggcctacctctactctctgttcctggatagtttataatcttggggtctcttttgtaaattaaatacaaaacaactgcaaaaaaaaaaaaaaaaaaaaaaaaaaaaaaaaaaaaaaaaaaa

SEQ ID NO: 928 - DNA, 1875 bp, Homo sapiens
gaattcgcggccgccgccgggccccagatcccagtgcgcgaggagcccagtcctagacccagcaacctgaggagaggtgcacacacccccaaggacccaggcacccaacctctgccagatgtgggggggtggctacccagaggcatgctcctcacccagctccactgtccctacctgctgctgctgctggtggtgctgtcatgtctgccaaaggcaccctctgcccaggtaatggactttttgtttgagaagtggaagctctatagtgaccagtgccaccacaacctaagcctgctgcccccacctactgagctggtctgcaacagaactttcgacaagtactcctgctggcctgacacccctcccaacaccactgccaacatttcctgcccctggtacctaccttggtaccacaaagtgcagcaccgcctagtgttcaagaggtgtgggcctgatgggcagtgggttcgagggccacgggggcagtcatggcgcgacgcctcccaatgtcagatggatgatgacgagatcgaggtccagaagggggtagccaagatgtatagcagctaccaggtgatgtacactgtgggctacagtctgtccctgggggccttgctcctggcgctggtcatcctgctgggcctcaggaagctgcactgcacccggaactacatccacgggaacctgttcgcgtccttcgtgctcaaggctggctctgtgctggtcattgattggctgctcaagacacgctatagccagaagattggagatgacctcagtgtgagcgtctggctcagtgatggggcggtggctggctgcagagtggccacagtgatcatgcagtacggcatcatagccaactactgctggttgctggtggagggtgtgtacctgtacagcctgctgagcatcaccaccttctcggagaagagcttcttctccctctatctgtgcatcggctggggatctcccctgctgtttgtcatcccctgggtggtggtcaagtgtctgtttgagaatgtccagtgctggaccagcaatgacaatatgggattctggtggatcctgcgtatccctgtactcctggccatactgatcaattttttcatctttgtccgcatcattcatcttcttgtggccaagctgcgtgcccatcagatgcactatgctgattacaagttccggctagccaggtccacgctgaccctcattcctctgctgggagtccacgaagtggtctttgcctttgtgactgatgagcatgcccagggcaccctgcgctccaccaagctcttttttgacctgttcttcagctcctttcagggtctgctggtggctgttctctactgtttcctcaacaaggaggtgcaggcagagctactgcggcgttggaggcgatggcaagaaggcaaagctcttcaggaggaaaggatggccagcagccatggcagccacatggccccagcagggacttgtcatggtgatccctgtgagaaacttcagcttatgagtgcaggcagcagcagtgggactggctgtgagccctctgcgaagacctcattggccagtagtctcccaaggctggctgacagccccacctgaatctccactggactccagccaagttggattcagaaagggcctcacaagacaacccagaaacagatgcctggccaaggctgaagaggcaaagcagcaagacagcagcttgtactatccacactcccctaacctgtcctggccgggtacaggccacattgatggagtaggggctggatatgatggagtagccatgctatgaactatgggtgttcccatgagtgttgccatgttccatgcacacagatatgaccttcagtaaagagctcccgtagg

SEQ ID NO: 929 - DNA, 1827 bp, Homo sapiens
atgagacacttaaaacttacaggttttatttttttcctgttgtctttgactgaatccctagccctacccacaaagcctcaggatgtagatcatttcaatgctactcagaaattcataaatgagaacgttgcatacctgaccatcattgcatctgcccagtatgttcaggaagcatcctttgaggaggtggaaatgctggtgaaggtcatgctggattacaaggataggtgcttggctgacagcacacttccggagtgttcaaagatagctaatgatgctatccaggacatgctctgtgatatgaaggggctgccacagaagcataacttctcccattgctgtaggcaagccggctttcaaagaagactctgcttcttctacaacaagaaagctaatgtaggatttctgccccctttccctactctggatccagaagagaaatgccaagcttataaaaataacagtgaatcttttctcaacctctatatgtatgaggtggccagaaggaacccctttgccttcgccccagttcttctgaacgttgccgctaggtttgaggaggcggcgaccacgtgctgtgaacagcaacagaaagccacctactttcaagacaaggcagcccccatcacacagtatttaaaagcgttatcttcttatcaaagaaatgtttgtggagcccttttaaaatttggacccaagaccttaaactctataaacatcgccgtgtttagtaagaagttccccaagattggatttgaagaccttacgtccctcttagaagatgtttcttccatgtatgacgggtgctgtgaaggggacgtcgtgcagtgcatccggagccagagccaggttatgcaccatatttgttcaaaacaagactccatctcaagtaagatcaaagcgtgctgtgagaagaaactgccagagcgcgcagactgcataatcaacgcaaacaaggatgacagaccagaagacttatctctgagaacacccaaatttaccgacagtgaaaatgtgtgccaagagcgagattccgagcaggacaagttctttgctgagtttctttatgattactccagaagacatactgaactgtctacaccagagctcctaagaattactaaagtgtataaggatctcctggaagattgctgcaacagaaaaaacccgttaagctgttaccgccatgcggaggataagttcaacgagacaacagagcgaagccttgcgatggtccagcaagagtgcaaacagttccaggaattggggaaggacgctctacaacgccatttccttgtcaagttcaccaaggcagcccctcaactccccatggaagaactggtctcccttagtaaggaaatggtggcggctttggcaacctgctgcactctcagtgacgagttcgcctgtgtggacaacttggcagatttagttcttggagaattatgtggaatgaataagaatcgaactatcaatcccactgtggatcactgctgcagagctgactttgccttcaggagaccctgctttgagcacctgaaagccgacaccacctatgcactcccatcagtctctgcacttgtatctgctttgcgtgcagactggtgtcagcctctcaaggaggaccttcagaataagagacacaggtttctggtcaacttagtgaagtggatgccagagatcacagatgaggaacgtctgtgtttgttcacaaagttcacggctgctggggaggagtgtggcaacatacagaagcctgaggcctgtttcagtccagagagttcaaaaaccggtgatgtgagtcaagatgcagagaaacaaaggtga

SEQ ID NO: 930 - DNA, 1628 bp, Homo sapiens
ctgtattgagtgttggccagtggtctttggtagcctgggcagcagcggggcagacatggagctgctggctgggactggcctgtggcccatggccatattcacagtcatcttcatattactggtggacctgatgcaccggcgccagcgctggacttctcgctaccctccaggccctgtgccgtggcctgtgctgggcaacctgctgcaggtggacctctgtaacatgccatacagcatgtacaagcttcaaaaccgctatggtgacgtgttcagcctacagatgggttggaagccagtggtggtgatcaatggactgaaggcagtgcaggaactgctggtgacctgtggagaggacactgctgaccgccctgaaatgcccatctttcaacatataggctatgggcacaaagctaaaggtgtggtgcttgcaccttacgggcctgagtggcgagagcagaggcgattctctgtgtccaccctgcgcaacttcggtgtgggcaagaaatccctggagcagtgggtgacagacgaggccagccacctctgtgatgccctcaccgctgaggcagggcggcccctcgatccttacaccctcctgaacaaggctgtgtgcaatgtaattgcatctctcatttatgcccgccgcttcgactatggagaccctgatttcatcaaggtgctaaaaatattgaaagaaagcatgggagagcaaactggcttgtttcctgaggttttgaacatgttcccagttctcctgcgcatcccagggttagctgacaaagtcttccctgggcaaaagacatttctcaccatggtggataacctggtgactgagcacaagaagacttgggaccctgaccagccacctcgagacctgactgatgcctttctggctgagatagagaaggccaaggggaaccctgagagtagtttcaatgatgcaaatctacgtctggtggtcaatgacctgtttggtgctgggatggtgactacttctatcactctaacctgggccctgctgctcatgatcctgcatccggatgtgcagtgccgagtacaacaggaaatcgatgaggtcatagggcaggtgcggcatccagagatggcagaccaggcccacatgccgttcaccaatgctgtcatccatgaggtgcagcgctttgcagacattgtcccaatgaatttgccacacaagacttctcgtgacattgaagtgcagggcttccttatccctaaggggacaaccctcatccccaacctgtcctcagtgctgaaggatgagactgtctgggagaagcccctccgattccaccctgaacacttcctggatgcccagggcaactttgtgaagcatgaggccttcatgccattctcagcaggccgcagagcatgcctgggggagcccctggcccgcatggagctcttcctcttcttcacctgcctcctgcaacgcttcagcttctccgtgcccactggacagccccggcccagcgactatggtgtctttgcctttctccttagcccttccccctaccagctctgtgcattcaaacgttagaaggaaagaaattctagtccagcctctaccttagtgtcatacacagattaaaacagttctgtggctgcca

SEQ ID NO: 931 - DNA, 1994 bp, Homo sapiens
atctctcccaggggctgtggactgctggctttctgttgataccttagagatgcagcggcttttggctccagcaaggcgggtcctgcaagtgaagagagtcatgcaggaatcttcgctctcacccgctcacctgctccccgcagcccagcagaggttttctacaatccctcctgctcccctggccaaaactgatacatggccaaaagatgtgggcatccttgccctggaggtctactttccagcccaatatgtggaccaaactgacctggagaagttcaacaatgtggaagcagggaagtacacagtgggcttgggccagacccgtatgggcttctgttcggtccaggaggacatcaactccttgtgcctcacagtggtgcagaggctgatggaacgcacaaagctgccatgggatgccgtaggccgcctggaagtgggcacggaaaccatcattgacaagtccaaggctgtcaagacagtgctcatggagctcttccaggattcaggcaacactgacatcgagggcatagataccaccaacgcctgctatggtggcactgcctccctcttcaacgctgccaactggatggagtccagctactgggatggtcgctatgccctggtggtctgtggtgatatcgcagtctacccaagtggtaacccccgccccacaggtggtgccggggctgtggcaatgctgattgggcccaaggccccgctagtcctggaacaagggctgaggggaacccacatggagaacgcctatgacttctacaaaccaaacttggcctcagagtatccactggtggatgggaagctgtctatccagtgctacctgcgggccttggaccgatgctatgcagcttaccgcaggaaaatccagaatcagtggaagcaagctggaaacaaccagcctttcaccctcgatgacgtgcaatatatgatcttccacacacccttttgcaagatggtccagaaatccctagctcggctgatgttcaatgacttcctgtcatctagcagtgacaagcagaacaacttatacaagggtctagaggccttcaagggtctaaagctggaagaaacctacaccaacaaggatgttgacaaggctctgctgaaggcctccctggacatgttcaacaagaaaaccaaggcctccctttacctctccacaaacaatgggaacatgtacacctcgtccctctacgggtgcctggcctcacttctctcccaccactctgcccaagaattggccggctccaggattggagccttctcctacggctcaggcttagcagcaagtttcttctcatttcgagtgtccaaggacgcttccccaggttcccctctggagaagctggtgtctagtgtgtcagatctgcccaaacgtctagactcccggagacgcatgtcccctgaggaattcacagaaataatgaatcagagagagcaattttaccacaaggtgaacttctctccccctggtgacacaagcaacctcttcccaggcacttggtaccttgaacgagtggatgagatgcaccgcagaaaatatgcccggcgtcccgtctaaggagaccaatccatacaaccattccccggggaaagaatgtgagcagagccgttacccaaacggcttccacttaaaattccacccacagcagtgaacggtgaatagacacagcgaccccataggatctgctccgcggtgaagggcctccctctgtggatcctgggtgaccctccctgaagcagtgagcaccacaggttctgctgtggaccagagcccccctgtggagagggagaaagaaaggggagccgctgacctgcagggatacagaccttccccacagcctggcagccgcccgtttgttgcagcttattatcagactgtgggctatcatagttcatgctcgtttcttaaagtttcccgagaatttctaaaattttgtatctaaacttttaatatggcgattaaaaggagagaagga

SEQ ID NO: 932 - DNA, 1994 bp, Homo sapiens; identical to SEQ ID NO: 931

SEQ ID NO: 933 - DNA, 2346 bp, Homo sapiens
ctcgcatctctctgcagcagcctccggggctacgttccatcctatcagtctgagaccagcccagaagaaaaaaaccaaaaatccttaattatcttcttttgctcggtacctacattgggaccatcaaaaaaaaattattacagtaaaccgtagccatgagggaaatcgtgcacatccaggccggacagtgtggcaaccagatcggtgctaagttctgggaggtgataagcgatgaacacggcatcgaccccaccggcacctaccacggagacagcgacttgcagctggaccgaatctctgtgtactacaatgaagctacaggtggcaagtatgtccctcgagctatcttagtggatctagaacccgggactatggactccgttcgctcaggtccttttggccagatcttcagaccggacaactttgtttttggtcagtctggggcaggcaacaactgggctaagggtcactacacagagggagctgagctggttgactctgtcttggatgtggtgcggaaggaggcggagagctgtgactgcctgcaaggctttcagctgacccactcgctgggtggaggcacgggctctggcatgggcaccctgctcatcagcaagattcgagaagaataccccgaccgcatcatgaacaccttcagcgtggtgccctcacccaaagtgtctgacaccgtggttgagccctacaacgccaccctgtccgtccaccagttggtagagaacacagatgagacctactgcattgacaacgaggctctctacgacatctgcttccgtacccttaagctcaccacgccaacctacggagacctgaaccatctcgtctctgccaccatgagcggtgtcaccacctgcctccgtttcccgggccagctgaacgccgaccttcggaagctggctgtcaacatggtgcccttcccgcgtctccacttcttcatgcctggctttgcccctctcaccagccgtggaagccagcagtaccgggccctcactgtgcctgaactcacccagcaggtcttcgacgccaagaacatgatggccgcctgtgacccacgccacggccggtacctcacggttgcggctgtcttccgtggacggatgtccatgaaggaggtagatgagcaaatgctcaacgtgcagaataagaatagcagctacttcgtggaatggatccccaacaacgtcaagacggctgtctgtgacatcccaccgcgaggcctcaagatggcagtcaccttcatcggaaacagcacggccatccaggagctcttcaagcgcatctctgagcagtttacggcaatgttccgtcggaaggctttcctccactggtacacgggtgagggcatggacgagatggagttcaccgaagctgagagcaacatgaatgacctcgtctctgagtatcagcagtaccaggacgccaccgcagaagaggaagaggatttcggagaggaggcagaagaagaggcctaaggcggaagccctgcgtcacctcaggctgcttagttcccttagcttttttccaactgccctttgtttctttctgctgcctctgtcctgtttttgttccgttttgttttctcattggggggtaaacggtgcctggcacgtggcaggcgctcaataaatatttctttgtggaatgtctcctttctctttccgatctgacattctgagcgttaaccctgtgcttcctcctggtacccatttctttattatgactgtccagttaatattcttccaatatattctccaggaaccagcgttcggctccagacccggggtagaacccagcccagttctaagaactcaagagagtagccaccatcttaaagcaaagtagcgggtggggaaaaggtgggtagaggagatgctacttagggggtgggattttccagtcagggccatttagacacgggaatcgctggggctttcagtcgatggggctttcttttttccctgcttcatctctcggcctcaggagaggtattaacagtattatcaccatttatatcctagctgtcctgagccaaatctgccattggaggtgtcttcccctgtgttggttctccaagggacgttgtatggggatttgtgggggcagggcagcaaggccttgttctctaaatgtccagaaacactctaattaccatttccacctgggtgcctcacacactccccagaggggaggtaacatctctgccccatttccatcctgttccttggcttggtcattccctacctttctattttctgttaaacttggctttttttttttcatattgaaaagatgacattgccccgagagccaaaaataaatgggaattgg

SEQ ID NO: 934 - DNA, 2118 bp, Homo sapiens
tgagagaaggtggctgcttaagaccacccatactaagttagacagagcactgaacctggttgcttatttctccataaccaactctctgaagccaaacagccagagtgatcctgttggcttcagacaggggggtttccaggatgccacagttggacctgtcctggctgggactgaggctggagacatccttaccatggctgcttttgctgctgatcggagcttcctggctcttggtccgtgtcttgactcagacctatatcttctacagaacatatcaacatctttgtgatttccctcaaccacccaaatggaattggttcttgggtcacctgggcatgatcactcccactgagcaaggtctgaagcaggtaactaagctcgtggccacctacccccagggcttcatgacatggctgggtcctatcctccctatcatcactctgtgccaccctgacgtcattcgatctgttctcagtgcctcagcttcggttgccctaaaggaagtaatcttctacagctttctgaaaccctggttgggggatggactcctgttgagcgatggtgacaagtggagctgccaccgccgcatgctgacacctgccttccacttcaacatcctgaaaccctatgtgaagattttcaacgacagcaccaacatcatgcacgccaaatggcaggacctggcctcaggaggcagcgcccgtctggacatgtttaagaacatcagcctgatgaccttggacagtctgcagaaatgtgtcttcagttttgatagcaactgccaggagaagcccagtgagtatatttctgccatcttggagctcagtgccctagtggccaaacggtaccagcagctgcttctacacacagactcactctatcagctcacccataatggtcggcgcttccataaggcctgcaaattggtacacaacttcacagacgctgtcatccagggtcgacgacgcgctctccccagtcagcatgaggatgatatcctcaaggccaaggccaggtccaaaactctggatttcattgatgtgctgctgctgaccaaggatgaagatggaaaggagctgtcagatgaagacattagagctgaggctgacaccttcatgtttgaaggccatgacaccacagccagtgggctctcctggatcctgtacaaccttgcaaggcacccggaataccaggagcgctgccggcaggaggtgcgggagctgctgagggaccgagagtctacagagattgaatgggacgacctggcccagctgcccttcctgaccatgtgcatcaaggagagtctgcgactgcatcccccagtcacggtcatctcccgtcgttgtacccaagacatcgtgctcccagatggccgggtcatccctaaaggtgtcatctgcatcatcaatattttcgcgacccatcacaacccaactgtgtggcccgaccctgaggtctatgatcccttccgcttcgacccagagaatatcaaggacaggtcacctctggcttttattcccttctccgctgggcccaggaactgcataggacagacttttgccatgaacgagatgaaggtggcactggcgctgacgctgctgcgcttccgcgtcctgccggatgacaaggagccgcgccggaagccagagctgatcctgcgtgcggagggcggactgtggctgcgggtggagccactgagcacacagtgactacgtacatctggacgggtcccacccacccacatacctttgtagatgtcacctgtgcctgaggctccttgaataccagtagggggctctggaggacaacagggaaccagcagttgtggcagggagggagatggggttggtgcccaaattcctgacttcatctggccgttcgtgggcctctacactgtcctttagcctagttggacttactctcttgggcgacagagagctaaggtaagtgtctaagcaggctcgagctcacagaatcttttaaattgaggtacatttcctgccttgacctccattctaatctcaaaactctcatcctgggattctgaagtgtttctgtgaaaactaaaattttaggtttattaaacctaacaagtctgccaaaaaaaaaaaaaaaaaa

SEQ ID NO: 935 - DNA, 2910 bp, Homo sapiens
  misc_feature (1899)..(1899): n is a, c, g, or t
ggcacgagctttacttatgtcacaggcataataaaacatgacttcattatataaggggctatgcttaaactgaaagagaagtaggagagagttatggagatgtgaatggacctattttgagctgtgaggctacattttaaggtacctacttagattataagcctgatgtgaactccaagagttcaataatcatgactattcatacaccttgcctgctgtgtctagcagatcaaatgaggaaacactaaccttgcggctgactgtagaaattagatcaatttagaggagtgggaacacatgtttgttatcaagagactaccatgtgtcattgtgggaataggagcagagaccttggtcctttgagattgctttcttagacataaaagggggacgctggtgagagaagcacacaagtagacatgattatttcactcctctgtctgccagatccctagagcatcagctggtgttccagcagcttgttccccgagcctcctgagtagcattatagagaggtctgttccagaaagcgaaagccagatccagctgccctcctggagcagaacaacacaatttccaggctgtccctgtggcctctccctcttccagtctgccccacttggtgtcagcgatgagctcctgcaacttcactcacgccaccttcatgcttatcggtattccaggactggaggaagctcacttttggtttggcttccccctactttccatgtacgctgtagcattgtttggaaattgcattgtggtcttcatcgtgaggacagagcggagcctgcatgcgcccatgtatctttttctctgcatgctggcagctattgatctggctttgtccacctctacaatgcccaagattctcgccctcttttggtttgactcccgggagattacttttgatgcctgtctcgcccagatgttcttcattcacgctctctcagcaattgaatctaccatcttgctggccatggcctttgaccggtatgtggctatctgccacccactgcgtcacgctgctgtgctcaacaatacagtaacagtccaaatcggcatggtggctctggtccggggatccctattctttttcccactcccactgctgatcaagcgactggccttctgccactccaatgtgctctcccactcctattgtgttcaccaggatgtgatgaagttggcctatacagacacattgcccaatgtagtctatggtctaactgccattctgctagtcatgggtgtagatgtcatgttcatctccttgtcctatttcctgattatacgagcagttctgcaattgccttccaagtctgagcgagctaaggcatttggaacctgtgtgtcacacattggtgtagtcctggctttctatgtcccactcattggcctgtcagtagtgcaccgttttggaaacagcctggatcccattgtgcatgttctcatgggcgatgtctacctgctgctgcctcctgtgatcaatcccatcatctacggtgctaagaccaaacagatcagaacacgggtgctggctatgttcaagatcagttgtgacaaggacattgaagctggaggaaacacgtgacccttaccgttctatcacccttgtcctacatggcttaatataatgattaataattcatcacaccggcctaactccagtcacccaaaagcacattagtgctttaactgaatgggacagtgaactaaagtatggtttatcttcatcatggatacaatgtgaaatatctatcatgtgttttaaagcttgtgctataaaatgagacccattgataatactaaatgaaacaactaggatttgtgatttaaactaattgtttgtgatttgaatgagatatgttgaaattactagcaactttttttattccnacttcctttgttgtaaagctatctgtaatgtttaacttctgaattgtggaacatggagctgacagtatggtagccaagggtttcctcactcatttcaatgctattattcactacccaggaacatttatgagctctaaataatatggctcatgaatgtatcatgtaacgtgttccagtccctgcgttaagtacttttcagactttctgtgatcttgctcttttcccaaggaagataccattgttgcctgccacaacatgtgacaaagactttaatgagtaaagaaactttcttgaatgttctgtgccaagattttaaattaaattggataattgaatacatttgctttaccaccatgttatattgcttcctgtttaacatctgccatctatttcctctgcctattacaaatcctgctttctctctgccgtgtgctagcatggacgtctttgtgtttgtggtaagtgattaaccctgtcctggtggagggcaacaaactgttcagcatgacagagtagctgcttcttctcatatgaacagaggagatttaaattttttagtctcttacatatccttgattgtgtcctctttgtattgtgtcctgtagctgtcaaatctcttaaatgtataacataagatattgcctgattcttgacttaggtatcaaacaacataataatttatcttaaaatgttcagtattatttttactgttttaatgttcataagtaatgttgggagacatgagtgatttcccccagtcctctttaccaacagtgcaaagggcctgccaggtatgggttgcacaactataaagatgttgaatgaacttatgtagaatattccctttgtattgagtggatgatgaaaatgttcttagattagggtattaatgacacctacaaaataatgttaatatattcgatgtacgcataatgcttaaaatgctgagatttatgtagtatgtatctgccacaataaaaaatcatttaaaataaaaaaaaaaaaaaaaaa

SEQ ID NO: 936 - DNA, 1961 bp, Homo sapiens
aaaaaaagcattccatttctgcaagatgtctatgaaacagacttcagtgtttctgttgatacagctcatatgctactttagacctggagcctgtggaaaagtgctagtgtggcccacagaatacagccactggattaatataaagataattctgaatgaacttgcccagagaggtcatgaagtcacggttcttgtatcttcggcttccattctcattgagcctaccaaggaatcttctattaattttgagatttactctgtacctttgagtaaaagtgatcttgaatatagttttgcaaaatggatagatgaatggacacgtgattttgaaacactctcgatttggacatattattcaaaaatgcaaaaagtcttcaatgaatattctgatgtcgttgaaaatttatgcaaagcactcatttggaacaagagtcttatgaaaaaactccaaggatctcaatttgatgtcattctcgcagatgctgtgggtccctgtggtgagctgctagcagaactgcttaagacacctttagtgtacagtctccgcttctgtcctggatacagatgtgaaaagttcagtgggggacttccactgcctccttcctatgtgcctgttgttctttcagaattaagtgaccgcatgacatttgtggaaagagtgaagaatatgttgcagatgctgtattttgacttttggtttcaaccatttaaagagaagtcctggagtcagttttacagtgatgttctaggtagacccacaacattaactgagatgatggggaaggcagatatatggctcattcgaaccttctgggacttggaatttccacacccattcttacctaattttgactttgttggaggactacattgcaaaccagccaaaccactgcctagggaaatggaagaatttgttcagagctctggagaacatggtgtagtggtgttttctctgggatcaatggttaaaaacctgactgaagaaaaagccaatgtagttgcttctgctcttgcccaaattccacagaaggttgtatggagatttgatggtaagaaaccagataccttaggatctaacactcggctgtacaagtggatcccccagaatgaccttcttggtcatccaaaaaccaaagcttttgtagctcatggtggaacaaatggcatctatgaggcaatctaccatggcattcctattgttggtattcccttgtttgcagatcaaccggataacattaatcacatggtagccaaaggagctgctgttagagttgacttcagcatactgtcaactacaggccttctcactgccttgaagattgtcatgaatgacccttcctataaggagaatgccatgagattatccagaatccaccatgatcagccagtgaagcccctggaccgagccgtcttctggatcgagtatgtcatgcgtcacaaaggagccaagcacctccgctcaactctgcatgaccttagctggttccagtaccactctctggatgtcattgggttcctattgctctgtgtggtaggtgtggtattcatcatcacaaaattctgcctcttttgttgccgtaagactgctaacatgggaaagaagaagaaagagtagcatcataaaggctgaagcagagccctgagagatgagcctctgccagctgcttccagaggaacctgttgtcatgccagtgccttccctctaaaagaagacagcgttgggacctcattgaacatggctccaatgaattcactatgttctgaagacatgcaagatttcatgccaaatatatattcagtgctaaaaaaacaaaatcctgtgttcagtttagaatgttttgatgtagctgagaagctttgcccaacaacaataactgaagctactgtagttcataaagttcacatggctttatagcctttgcaaaacatatctataaatcaattagtttttgaaaataccc

SEQ ID NO: 937 - DNA, 653 bp, Homo sapiens
aggcggctgccgaagatggcggaggggcaggttctagtattggatggccggagccatcttctgggccgcctggcggccattgtggccaagcaggtactgctgggccgaaaggtggtggttgtacgctgtgagggcatcaacatttctggaaatttctacagaaacaagttaaagtatctggcctttctccgaaagcggatgaacaccaacccgtctcgaggcccctaccacttccgagccccaagccgcattttttggcgcactgtgcgaggcatgctgccgcacaagaccaaaagaggccaggctgccctggaacgcctcaaggtgttggatgggatccctccaccctatgacaagaaaaagcggatggtggtccctgctgccctcaaggttgtgcggctgaagcctaccagaaagtttgcttacctggggcgtctggctcatgaggtcgggtggaagtaccaggcagtgacagctactctggaggagaaacggaaggaaaaggcaaagatccattaccggaagaagaagcagctcttgaggctaaggaaacaggcagaaaagaatgtggagaagaaaatctgcaagttcacagaggtcctcaagaccaatggactcttggtgtgaacccaataaagactgtttgtgcctca

SEQ ID NO: 938 - DNA, 1073 bp, Homo sapiens
gaggtatctgggcgctgtaaggttgtccgtagaaccctctcgcggtcagagggggccgaggagtgaggtgcatgccccacctccccattccacccctccccaggagccctagtccgtgtgctgaggagagactggcgggagagtagggcgttctctgcggagagccccgcgcctcacttccggtggtgcattgacactcttggaacccgcaggcatgccggcacctgtgaatgagacatttttgttaccgcagcagcggtgctgagcgaggagctttgaaaaattaaatagtgctccctagaagcatcaagaaggagaatgtctgtgacactgcatacagatgtgggagatatcaagatagaagtcttctgtgagagaacacccaaaacctgtgagaatttcttggctctgtgtgccagtaattactacaatggctgtgtgttccatagaaatatcaagggcttcatggttcaaacaggagatccaacaggtactggaagaggaggcagcagtatctggggcaagaagtttgaggatgaatacagtgaatatctgaagcacaatgttcgaggtgttgtatctatggctaataatggcccaaacaccaacggatctcagttcttcatcacctatggcaagcagccacacttggacatgaaatatacagtgttcggaaaggtaatagatggtctggagactttggatgaattggagaagttaccagtaaatgagaagacttacagacctcttaatgatgtgcacattaaggacataactattcatgccaacccgtttgctcagtagctgtaataggcctggccacacactggcaaacacttaactgggaaacgcccagtgtggtttatccagttctgagtccatcagagactggtccttctgctggcatctacagtactgggctccatgcgggagccctggggttcacgccccatcttgaacatattctgtgccacggctgtcgctcaataggtttactttaaatagagagcagtgccttgtttttattaaaaaaaaaaaaaaaaaaaaaaaaaaaaaaaaaaaaaaaaaaaaaa

SEQ ID NO: 939 - DNA, 1414 bp, Homo sapiens
gtggaattctgccaaactcggagagaagcctgtgcctgcagctgactcactccaggactgatgggaaccctgctgttcctaccgctccccatggacagcaacaggactgtcgtccatgtgctctcacggactttgtaccatatgctactgtggacagctgtgctaaatcttgttgctgagtctcatgcaggtcttccgaaggctgtggtgaaacttgagcccccatggatccaggtgcttaaggaagacactgtgacactgatgtgcgaagggacccacaacaccaagaactgttctactcagtggtttcacaatgggagctccatctggcatcaagcccaagccaactacacgtttaaggccacagtcaatgatagtggagaataccggtgccgaatggaggagaccggcatcagcgaacccatacatctgggagtgatttctgactggctgctactccagacctctcaactggtgtttgaagaaggggaaaccatcacattaaggtgccatagctggaagaacaaacagctgactaaggtcttgttgttccagaatggaaaacctgtgaggtattatcatcaaagcagcaatttttcaatccccaaagccaaccacagtcacagtgggaactactattgcaaagcatatctaggaaggacaatgcacgtgtccaagcctgtcaccatcactgtccaagagcccaaatccagcagttcgttgccggtattgacgattgtagctgctgtcgctggaattgctgtagctgccattgttattatcctggtatccttggtctatctcaagaaaaagcaggttccagacactccttctggtctcgaagaagctgagaaaaatgaggtggagaatacaatcacctattcacttctcaagcatcctgaagctccggatgaagaatcagatcacgactaccagaaccacatttagtctctcttgagattgggaaaagcaaaccagtaaggccaggacctagcgtctcctggtccaaggaatgctgtagatatgaaagaaaacatctagagtcccttctgtgagtcctgaaaccaacagacactacgatattggttcccaatggttgactgtactaatgacttccataacttacagcttcccaactaaagactcttttgctatagatccacacagccaataaaattaatcaacttactgttgttaagagactacagcaacgtgggaactgcttatattacatgctaaggagaacaagtaacattaggatgcataatctcagcgaggatcaactagacgtgtaccaacctgtcaaaagtgatgcttctttataagaaactttatttccttatttttctataaaggtcacatattacttttatagtaaaatgttgtgaaaatgtccaaaaaaaaaaaaaaaaaa

SEQ ID NO: 940 - DNA, 2795 bp, Homo sapiens
agttgcttcagtgtcccggtgcggttagtcacgtttcgtgcgtgctcattctgccaagatgcctgaggaaacccagacccaagaccaaccaatggaggaagaggaggtcgaaacctttgcctttcaggcagaaattgcccagttaatgtccttgatcatcaacactttctactcgaacaaagagatctttctgagggagctcatttccaactcctcagacgctctggataagatcagatacgagagcttgaccgaccctagtaaactggactcggggaaggagctgcacattaatctcattcccaacaagcaagaccgaaccctcactattgtggatactggcattggaatgaccaaggctgacttgatcaataaccttggcactattgccaagtcaggcaccaaagccttcatggaggctttgcaggctggtgcagatatctctatgattggccagtttggtgttggtttttactctgcgtatttggttgctgagaaagtgactgtcatcaccaagcataatgatgacgagcagtacgcctgggagtcctcagctggaggatccttcactgtgaggacagacacaggtgaaccaatgggtcgtggaacaaaggttatcttgcatctaaaagaagaccaaactgagtatttggaggaaaggagaataaaagaaattgtgaagaaacattctcagtttattggctaccccattactctctttgtggagaaggaacgtgacaaggaagtcagtgatgatgaggctgaagaaaaggaagagaaagaggaagagaaagaaaaagaagaaaaggagtctgatgacaagcctgaaatagaagatgttggttctgatgaagaagaagaagagaagaaggatggtgacaagaagaaaaagaagaagataaaggaaaagtacattgatcaagaagaactcaacaaaacaaagccgatctggaccagaaatcctgatgacattacgaatgaagaatacggagagttctacaagagcttaaccaacgactgggaagaacatttggcagtaaagcatttttctgttgaaggacaattagaattccgggctcttctttttgtcccaagacgcgctccttttgatctatttgaaaacagaaagaaaaagaacaacatcaagttgtatgttcgcagagtttttatcatggataactgtgaggagttaatccccgagtatctgaatttcatcagaggggtggtggattctgaggatctccctctaaatatttcccgtgaaatgctgcaacaaagcaaaattctgaaagttatcaggaagaatttggtcaagaaatgcctagaactatttactgaactggctgaagataaagagaactacaaaaagttttatgagcagttctcaaaaaatataaagcttggaattcatgaagactctcaaaatcggaagaagctttcagagctgttgagatactacacatctgcttctggggatgagatggtttctctgaaggactactgcaccagaatgaaggaaaaccagaagcacatctattttatcacaggtgagaccaaggaccaggttgctaactcagcctttgtggaacgtctccgaaagcatggcttagaagtaatctatatgattgagcccattgatgagtattgtgtgcaacagctgaaggaatttgagggcaagaccttggtgtcagttaccaaagaaggactggaacttccagaagatgaagaggaaaagaagaaacaggaagagaaaaagacaaaatttgagaacctctgcaaaattatgaaggatattttagagaaaaaggttgaaaaggtggttgtgtcaaaccgattggtgacatccccatgctgtattgtcacaagcacatatggctggacagcaaacatggagagaatcatgaaagctcaagccctcagagacaactcaacaatgggttacatggcagcaaagaaacacctggagataaaccctgatcactccattattgaaaccttaaggcaaaaggcagaggctgacaagaatgacaagtctgtgaaagatctggtcatcttgctgtacgaaacagcactcctgtcttccggcttcagtctggaagatccccagacccatgctaacaggatctacaggatgatcaagcttggtctaggtattgatgaggatgatcctactgtggatgataccagtgctgctgtaactgaagaaatgccacccctggaaggagatgatgacacatcacgcatggaagaagtagactaggcttcaccagaactatgtgtttgatgcttaccttcattccttctgataatatattttccatgatttttgtttatttttgttaacatttaaaacatctgtgtggcatgaaaactaggggaaggtaaaaatttctacatgtgatactgtgatactataggtttgactcaagaggttgatagaacgtttgttgtaagacgtaatgtaacctactgttactgttaactatgtggtctgaagtgtttagctgttgagctggattcctttagtagaccaaattaagatgacttaagtttcatcttaaatttttttcattccctgtagttaattctgcatgtactagtcttagaagtaaacacaagctaaaacaacttgacaggaattccccaagtggcttgttttccaaagtactgagaacaaaaccctaagttcccctaggtcttgtaactcagcaaggcttgtgaatgtgaaaataacagtgcccaatcacattctgctttaaaaaggtaaatacagatgagataaaaaaaaaaaaaaa

SEQ ID NO: 941 - DNA, 2795 bp, Homo sapiens; identical to SEQ ID NO: 940

SEQ ID NO: 942 - DNA, 1778 bp, Homo sapiens
atatcagccatgcttgtcacagcgggttccctactaggggccatttggaccgtgctccatctccggattttgctgctggctgctgtcacctttctgttcctggctgatttcctcaaacaccggcgccccaagaactacccgccagggccttggcgcctgcccttagtgggttgcttgttccatttggatcctaaacagccacacctatcccttcagcagtttgtgaagaaatatgggaatgttttaagcctggattttgctaacattccttcagtggttgtaactggcatgcccttaatcaaagaaatctttactcaaatggagcacaattttttgaatcgccctgtcactcttctccgaaaacatctctttaacaaaaatggattgatcttctccagtggccagacatggaaggagcaaaggaggtttgccctgatgactctgaggaactttggactaggaaagaagagcttagagcagcgaatacaagaggaagcctaccaccttgtggaggccataaaagatgagggaggactgccttttgaccctcacttcaatatcaacaaagcagtctctaatatcatttgctctgtcacctttggggagcgctttgagtaccatgacagtcagtttcaggagatgctgaggctactggatgaggccatgtgtttggagtcatcaatgatgtgccagctctacaatatctttccaaggatacttcagtatcttcctggatcacaccaaacacttttcagcaactggagaaaactgaagttgtttatttctgatattattaagaatcaccggagagactgggatccagatgagccaagggacttcattgatgctttcctcaaggaaatggcaaagtacccagacaagactactacaagtttcaatgaagaaaacctcatctgcagtactttggatcttttctttgctggtacagagacaacatccactacactgcgctgggctctgctctgcatggccctgtacccagaagtccaagaaaaaatgcaggctgagattgacagagtgattggccaaggaagacagccaaacctggcagaccgagactccatgccctacaccaacgccgtcattcacgaggtgcagagaataggcaacatcatcccctttaatgttcccagggaagtggcagttgacacctatttggctggatttaacttgccaaagggtactatgattctaaccaacttaactgcactgcacagggaccctaaagagtgggccaccccggacaccttcaacccagagcactttttggagaatggacagtttaagaagagagaatcctttctgcctttctcaatgggaaagcgagcatgtcttggagaacaactggccaggtccgagctgttcatttttatcacttctcttatccaaaaatttaccttcaagcccccggtcaacgagaagcttagtctgcaattcagaatgtccgtcaccatttccccagtcagtcaccgcctttgcgcaattcctaggctgtgatgtcgaagaggaaagtatgaagaaatggcatctgcatggaggacactggtgtctgctcacattgaggggatagaattaaagatgactgagggagtgtgtgcaatgagactaaggaaattgaatcaagttatgggttcattaagtagaaagccacttgtgagctcaatggtacagcttcacgactgacatcttgcagagaaaaatgattcttccagaaaagaaaatgattacgggaccatggagaatggaagccgaattcc

SEQ ID NO: 943 - DNA, 2089 bp, Homo sapiens
ctgtgagagtgagggcagctactgaggagtggctgcaccatgagcgtctctgcactgagctccacccgcttcacgggcagcatctctggcttcctccaagtggcctccgtgcttggtctgcttctgctgctggtcaaagcagtccagttctacctgcaaaggcaatggctactcaaggctttccagcagttcccatcacctcccttccactggttctttgggcacaagcagtttcaaggtgacaaagaactacagcaaattatgacatgtgtggagaatttcccaagtgcctttcctcgatggttctggggaagcaaagcctacttaattgtctatgaccctgactacatgaaggtgattctcgggcgatcagatccaaaggccaatggcgtctacagattgctagctccttggatcggatatggtttgctcttgctgaatggacaaccgtggttccagcaccggcgaatgctaaccccagccttccactatgacattctgaaaccctatgtaaaaaacatggctgactccattcgactgatgctagacaaatgggaacagctggcaggtcaagactcctctatagaaatctttcaacatatctccttaatgaccctagacactgtcatgaagtgtgccttcagccacaatggcagtgttcaggtggatggaaattacaagagctatatccaggccattgggaacttgaatgacctctttcactcccgtgtgaggaacatctttcatcagaatgataccatctataatttttcttccaatggccacttgttcaaccgtgcttgtcaacttgcccatgatcacacagatggtgtgatcaagctaaggaaggatcagctgcagaatgcgggagagctggaaaaggtcaagaagaaaagacgtttggattttctggacatcctcttacttgccagaatggagaatggggacagcttgtctgacaaggacctacgtgctgaggtggacacatttatgttcgagggtcatgacaccacagccagtggagtctcctggatcttctatgctctggccacacaccctgagcaccaacaaagatgcagagaggaagttcagagtgtcctgggggatgggtcctccattacctgggatcacctggaccagattccctacaccaccatgtgtatcaaggaggccctgaggctttacccacctgttccaggcattgtcagagaactcagcacatctgtcaccttccctgatgggcgctctttacccaagggtatccaagtcacactctccatttatggtctccaccacaacccgaaggtgtggccaaacccagaggtgtttgacccttccaggtttgcaccagactctccccgacacagccactcattcctgcccttctcaggaggagcgaggaactgcattgggaaacaatttgctatgagtgagatgaaggtgattgtggccctgaccctgctccgctttgagctactgccagatcccaccaaggtccccatccccttaccacgacttgtgctgaagtccaaaaatgggatctacctgtatctcaagaagctccactaattccgttgtggagctccgaaatctgaaatgagtttcactggcagaaagctgagttggtggtgtgactagccttcttcagaagagtgcttcagagagtcctctcctcctctcttcagtacagatcacccttctcagcactggaatattcctctgctttaaagccagcacccttcccataccccctcttctaaaagccttcccttttacaaatgttcttatgacatcatcaagaccactgaaaaactccaagataatttcccatctcaatattccttactccatctaacctactaagtcccttttgaattatgaggaataattcaatttgttccatgggctccaaaactcaaggcctgagcattattgtgaaacctttattcagcctaatatcatcttcacaagactgttacctggtacgttcatctaaatctcccctgcatagtctctctacctgactattcctcacacaagtttctttaccttccctcctttctccaataaagtgtccagtgtcctgcac

SEQ ID NO: 944 - DNA, 2089 bp, Homo sapiens; identical to SEQ ID NO: 943

SEQ ID NO: 945 - DNA, 2061 bp, Homo sapiens; identical to SEQ ID NO: 393

SEQ ID NO: 946 - DNA, 1662 bp, Homo sapiens
cattcagtttagtcagaatccatgggtgggctcagctgtctcctccgtacctagtctgcggttatggcttcgctcacggtgaaggcctatctactgggcaaggaggaggcggcccgcgagatccgccgcttcagcttctgcttcagcccggagccggaggcggaagccgcggctggcccggggccctgcgagaggctgctgagccgggtggctgtgctgttccccgcgctgcggcctggaggctttcaggcgcactaccgcgatgaggatggggacttggtcgccttctccagtgatgaggaactgacaatggccatgtcctatgtgaaagatgacatcttccgcatctacattaaagagaagaaggagtgccggcgggaacatcgccccccatgtgctcaggaggcacgaagcatggtgcaccccaacgtgatttgtgatggttgcaatgggcctgtggtgggaactcgctataagtgcagtgtgtgccccgactacgacctgtgcagcgtctgcgaggggaagggcctgcacagggagcacagcaagctcatctttcccaacccctttggccacctctctgatagcttctctcatagccgctggcttcggaagctgaaacatgggcactttggctggcctggctgggagatgggcccaccagggaactggagcccacgtcctcctcgcgcaggggatggtcgcccttgccccacagctgagtcggcttctgctccatcagaggatcccaatgtcaatttcctgaagaatgtgggggagagcgtggcagctgccctcagccctctaggcatcgaggttgacattgatgtggaacatggagggaagagaagccgcctgacacccacctctgcagaaagttccagcacaggcacagaagataagagtggtactcagccaagcagctgctcttcggaagtcagcaaacctgacggggccggggagggccctgctcagtctctgacagagcagatgaagaagatagccttggagtcggtgggacagccagaggaactgatggagtcggataactgctcaggaggggatgacgactggacgcatttgtcttctaaagaagtggacccatccacaggtgaactccagtctctacagatgccagaatcggaagggccaagctctctagacccctcacaggaaggccccacagggctgaaggaagctgccctgtacccacatctcccaccagaggctgatccccggctgattgagtcactctctcagatgctgtccatgggtttctcggatgaaggcggctggctcaccaggctcctacagaccaagaattatgacatcggggctgctctggacacgatccagtattcaaagcaccctccaccattgtgacagtgctgtggccaagtcccacaacccacctcccttgtcttctagttgcatcatgtagagtagcagggcttctaaggcccagtgtcttggcattcttctagaaccttcaggtgggactgtgaggccttcttaggcagtaggaaagtgcatgagaagagagtctgagtgtgcacatgctgacccctgagcacagatccaagcagctgtggctgggcttmcgctgctttccctcggcctggcctttgccagggagctgtggagtcatgctgcactccactt

SEQ ID NO: 947 - DNA, 657 bp, Homo sapiens
atgcctatgacactgggttactgggacatccgtgggctggctcacgccattcgcctgttcctggagtatacagacacaagctatgaggacaagaagtacagcatgggggatgctcccgactatgacagaagccagtggctgagtgagaagttcaaactgggcctggacttccccaatctgccctacttaattgatgggtcacacaagatcacccagagcaatgccatcctgcgctaccttggccggaagcacaacctttgtggggagacagaggaggagaggattcgtgtggacgttttggagaaccaggctatggacacccgcctacagttggccatggtctgctacagccctgactttgagagaaagaagccagagtacttagagggtctccctgagaagatgaagctttactccgaattcctgggcaagcagccatggtttgcagggaacaagattacgtatgtggattttcttgtttacgatgtccttgatcaacaccgtatatttgaacccaagtgcctggacgccttcccaaacctgaaggacttcgtggctcggtttgagggcctgaagaagatatctgactacatgaagagcggccgcttcctctccaagccaatctttgcaaagatggccttttggaacccaaagtag

SEQ ID NO: 948 - DNA, 2466 bp, Homo sapiens; identical to SEQ ID NO: 289

SEQ ID NO: 949 - DNA, 2524 bp, Homo sapiens; identical to SEQ ID NO: 206

SEQ ID NO: 950 - DNA, 3715 bp, Homo sapiens
ccctaagaacgaggaaccaaagtgggacccagcgctgggctccctcaaacaggacagaaagctgccccagtgactagtcctggaggttcctctccccaggaagctctgagaaccctccccgggagaggggacagcaatctgtaggtgggcaaggtagcaggaagggtaccgcttccctggatgcctggtctgggattccttccccaaatccatcccagagatttttctgcatcaggaggggaacagttgctatgctgactgggctgactatgggagctccaggggttctgggagaagtgaccctaaagcaagagggcatttggagagatgcgtgccaggggcttggaggagaaatgcatgtattttaggccgtgtctcagaaaaagaggcagcatccctgaaaagtgactagaattgacctggaagaggccatggactcagagtgtgcttaaaagccaatgctctccttggggaatgtagggaccagccgatgtcacagggacacactgtcacagggacagtgacctggagcaccaagcccagaagacagatgggaagcaggagagtctttaccccggcatggcttggattgctacggggaagctcctgatggaaccctaccatcctttagtccaggcagcaactggggctgaacaagaaggggctgggtggtgagtggttgggggaagtctggctaagcctggtcaagaacttgaggggcaagtccccggaagtgtgttccttctggaagatggctcctaacacttctaccatggatgaggccgggctgccagcggagagggatttctcctttcgcatcctcacggcctgtttcctgtcactgctcatcctgtccactctcctgggcaatacccttgtctgtgcggccgtcatccggtttcgacacctgaggtccaaggtgaccaacttctttgtcatctctttagctgtgtcagatctcttggtggctgtcctggtcatgccctggaaagctgtggccgagattgctggcttttggccctttgggtccttttgtaacatctgggtagcctttgacatcatgtgctctacggcgtccattctgaacctctgcgtgatcagcgtggacaggtactgggctatctccagccctttccagtatgagaggaagatgacccccaaagcagccttcatcctgattagcgtagcatggactctgtctgtccttatatccttcatcccagtacagctaagctggcacaaggcaaagcccacatggcccttggatggcaattttacctccctggaggacaccgaggatgacaactgtgacacaaggttgagcaggacgtatgccatttcatcgtccctcatcagcttttacatccccgtagccattatgatcgtcacctacaccagtatctacaggattgcccagaagcaaatccggcgcatctcagccttggagagggcagcagtccatgccaagaattgccagaccaccgcaggtaacgggaaccccgtcgaatgcgcccagtctgaaagttcctttaagatgtccttcaagagggagacgaaagttctaaagacgctgtctgtgatcatgggggtgtttgtgtgctgctggctccctttcttcatctcgaactgtatggtgcccttctgtggctctgaggagacccagccattctgcatcgattccatcaccttcgatgtgtttgtgtggtttgggtgggcgaattcttccctgaaccccattatttatgcttttaatgctgacttccagaaggcgttctcaaccctcttaggatgctacagactctgccctactacgaataatgccatagagacggtgagcattaacaacaatggggctgtggtgttttccagccaccatgagccccgaggctccatctccaaggactgtaatctggtttacctgatccctcatgccgtgggctcctctgaggacctgaagaaggaagaggctggtggaatagctaagccactggagaagctgtccccagccttatcggtcatattggactatgacaccgatgtctctctagaaaagatccaacctgtcacacacagtggacagcattccacttgaatattgggtcctcatctctgaggccacgagttcccttgggcttgctgttaaggaattaacaggagatccctctgctgcttttggacaattacgaagcttctcaaactcactgattccagtgtattctctagcttcaagggaaatgacttcggctctgaaatcagtttgggagtattatcttaggacattataaaacaacaacaaacaaacaaacaaacaaacaaataggccaagagtcaactgtaaacagcttcacttaaaaatcgaactttccagaaaggaagggtaggagttgagtttgctgtccaaacaggtgctaaaactgtccgagcagttttcagattggaaaggtaggtgcatgcctttgttaattaacttctccaataataattgagccttacagcaggagtgggattcctttttctcagaattgacagatgcattgttgatgacggttttatttatttatttattgtactatatgaatattttaaatttatcatagtgaatctatatttaacatatttaacagagcaaaccaatgtgttatctgagactgacctctccatttgtactagcactttatgagccaatgaaacatacgcgtagactctgagattctgaattgtgagttacttctgggaacacagcaaagactgatgtggtggctccttaactcgacaaggacacaaagaaacgcaagaggagaagtgactaatgccaccaatgctccccctaaaaagattttgaaaagattagtttttttttttttttaaaagaagctactattgtgttctgagtgttttaaatggcagaggctttccccggggcgaatttgcacttctgtaaatatctatgtaagaaccagctcaagaggaatacaactttatatttccgcttttggatggcgaggaagagcatatgccactttgtatttatgtaaactaattggccctccttgtcatttctcatttcatgcttgaaatagctttctgaaacaaacaaatgactgtccaggctggagatctgcagggtggagaatgagttgtaaattcacaggtcacagcagcccctccgatagctgggctcatcattggtcctttatctgcccaggtctaaccaagtcggctgcttaaggggctacttttgtagtgctttaatccgaatttagtatcctctcttttaaaaaaaaaagctctttaatgttagtggtaaactagctaatgaacggtacctcatcgctgcataatacacttctgttggtgggggcgtagacgagcccttcccggtgcgagcaccacaaagccatctgcatagctagtcacaaatgctgtttttctttctctgtgggtttgaatctagtttccttgttatcatagcctggactgcaaaaagatccatccagtcccctcttgtgggggcattgcaacagtgtttctttttgtttttgttttgtttttgaaatgtttacaaggtgttctttggaagcagttgcaacacgtggatggaactgaagaaaaggctgactggcttgctaacggtatctcctgcagggggtttgtactgcggactttgaatgttttctcagctctaaggcttgtatgctttcttacatacaataaa

SEQ ID NO: 951 - DNA, 1136 bp, Homo sapiens
gcggtctagggagcggcggcactggcagaagcggctgttacagcggcggtggcggcgacggctgttgctgagccccggcagccgcgaggaccccgggctggggccacgcgggcctgaggctcggctccagcagcccccaagcggacgaacccgcgctctgtctcccaaggcgaagtccgaggtctcaggtatggatctttggcgggtgttcttaaccctggcactggcagtctccagcgacatgtttcctggaagtggggctacaccagctactcttggcaaagcttccccggttctgcaaagaattaatccaagcctgagggaaagttcctctggaaagcctcgattcaccaagtgtcgttcccctgaactggagaccttttcatgctactggacagaaggggatgatcataatttaaaggtcccgggatctattcagctatactatgctagaagaattgctcatgaatggaccccggaatggaaagaatgccctgattatgtctctgctggagcaaacagctgttacttcaactcatcgtatacctccatttggataccctactgcattaagcttactacaaatggtgatttgttggacgaaaagtgtttcactgttgatgaaatagtgcaacctgatccgcccattggcctcaactggactttactaaacatcagtttgcctgggatccgtggagatatccaagtgagttggcagccaccgcccagtgccgatgttctgaagggatggataattctggagtatgaaattcagtacaaagaagtaaatgaaacaaaatggaaaacgatgagcccgatatggtcaacatcagtcccactgtactcactgagactggataaagagcacgaagtgcgtgtgagatccagacaacggagcttcgaaaagtacagcgagttcagtgaagtactccgtgtaacgtttcctcagatggacacactggcagcatgtgaagaaggacccaagttcaattcccagcacccacatcaagagattgacaaccacctgtaacaccagctccagaggatctgccatccctagccttgcgggcacctgcattcatatgcacatacatgcatacacataattaaaattaataaaataaaattttaaaaat

SEQ ID NO: 952 - DNA, 2343 bp, Homo sapiens; identical to SEQ ID NO: 296

SEQ ID NO: 953 - DNA, 2343 bp, Homo sapiens; identical to SEQ ID NO: 296

SEQ ID NO: 954 - DNA, 2462 bp, Homo sapiens
tgtgctgttggaaccatggcgcctgtctgcctgtttgcgccgctgctgctgttgctcctcggaggtttccccgtcgccccaggcgagtcgattcgagagactgaggtcatagacccccaggacctcctggaaggcagatacttctctggagccctcccggacgatgaagacgctgggggccttgagcaggactctgactttgagctgtcgggttccggagatctagatgacacggaggagcccaggaccttccctgaggtgatttcacccttggtgccactagataaccacatccccgagaatgcccagcctggcatccgtgtcccctcagagcccaaggaactggaagagaatgaggtcattcccaaaagggtcccctccgacgtgggggatgacgatgtgtccaacaaagtgtccatgtccagcacttcccagggcagcaacatttttgaaagaactgaggtcttggcagctctgattgtgggcggcgtagtgggcatcctcttcgccgttttcctgatcctgctgctggtgtaccgcatgaagaagaaggatgaaggcagttacgacttgggcaagaaacccatctacaaaaaagcccccaccaacgagttctacgcatgaagcttcttcccatgagtgctgcttggacttcatggggagaggagttgaggattgtggacagtggacattggcagagagagggcaccttaatactgacttgtatctccatctctggtcacctttctggtgtcagaagagatatgatcttctactgtgctgcctcagagagagagagagagagagagagagagatgggatggggtgcggagggagtgtccgtgtgtgtgtgtgtgtgtgtgtgtgtgtgtgtgtgtgtgtgtctgtctgtctgtctgagttgccctggcagaaaaatggggttaaacttgttctttcttgaaggcaagcctggaattgggtctttttgttgttgtttcaaatttctagaatagaatgtaggaccagtttagttcctgccgttaacatgtctcatttatgactgcctttattctagaggcaaggagttgggggcaaggagctggaacccgctgcaccttgagatgtgttcacccgagtacttcctcacactacagggtctctgtggtgtatctcggggcattctaggctcagtgacttttgaaattcaaccttttttttttttttttaaatccagggagggtgggactgaagtgctgacagctcatgctgaagtacacttgtagaagatttgtaaaatgtaaggttttttttttttttttttaatggtccattccttcatgggagcgtgtgccctgggctgagagcgtggggatgcacagatgttctttctagaacatattcgttgcaacagctaactttgtgttttcatggttttttatgttttgttttgtttttttgaaaatgagagaagagctggagagatgatttttatgatttttttttgttttgttttttactatttatagcttcagacggggctgcttttctctacctttctgtctttactgtttcccactattttttttttttaatgttctgtgctcttgtttttgaccctggccctttctgaagttgctttatcttaaaaagtagctacagtgttctagcagattccagaatataatgtagggggtagcgggatatttgtgttcttgtaatatatattatccttcctcggttctaggagaatagataaatatatttttttaggatatagaatgatactacaggtctcatgttggctgggtggctgcgtgagtgagttttcgtgcggctgagtaagctgttgccctcttctcttgccctgctcctggtgccttctcgagatcgagctggagtgactgagggtacctgactctaacctcactgtgccttctgccgggggctctgcccaggagcctctgggtttgctttctccaggctctctagatgcacgatccaatacagtgacctcctgtggctgtatcaatcagttcacttgactatgtgattggaaatcattcctctgttgcactggccacacaatttaagtgcctagtcaccatccaccgagcacagagattgaggctggtttagcaggttacggttcagttttgcttgtctccccgggcaagagaaggggacttaggaggaaggtgatgaggtcccagggactcctgtcacccaggactctccctcttacagaggaaagacctagtagcttaaaaggtctgggctgtgtgggggtggggcggtcataccactccctcaaccatgccctatgcctgtaagcccccatcaccacctccgtgcagggtcctagctggctgggtcctcttctagccttgtgcctgctccttttctgtatcccttactctgttgtctgttactgatttttttgataaaaagataataaaacctggtactttctaaaaaaaaaa

SEQ ID NO: 955 - DNA, 2462 bp, Homo sapiens; identical to SEQ ID NO: 954

SEQ ID NO: 956 - DNA, 1892 bp, Homo sapiens
aaactgaccaaggagtatgatcaatcccgtccagcctccgagcctgcagccgtttggtcatggtgagctgcttcagctaacaattgcactgacagtgctcttgagccaagttgcttctgggcggaagtagtccatctagggctcggcctctttaaagaaacagacttctgcaaccttgggactacgtttggggtcgccggctattggacggagcagcgcaattgttagctgaagcagctcaccatgaccaaacggctgcaggctcggaggctggacgggattgatcaaaacctctgggtggagtttggcaaactgaccaaggagtatgacgtcgtgaacttgggtcagggcttccctgacttctcgcctccggactttgcaacgcaagcttttcagcaggctaccagtgggaacttcatgctcaaccagtacaccagggcatttggttacccaccactgacaaacgtcctggcaagtttctttggcaagctgctgggacaggagatggacccactcacgaatgtgctggtgacagtgggtgcctatggggccttgttcacacgctttcaggccctggtggatgaaggagatgaggtcatcatcatggaacctgcttttgactgttatgaacccatgacaatgatggctggaggttgccctgtgttcgtgactctgaagccgagccctgctcctaaggggaaactgggagccagcaatgattggcaactggatcctgcagaactggccagcaagttcacacctcgcaccaagatcctggtcctcaacacacccaacaaccctttaggaaaggtattctctaggatggagctggagctggtggctaatctgtgccagcagcacgatgtcgtgtgcatctctgatgaggtctaccagtggctggtctatgacgggcaccagcacgtcagcatcgccagcctccctggcatgtgggatcggaccctgaccatcggcagtgcaggcaaaagcttcagtgccactggctggaaggtgggctgggtcatgggtccagataacatcatgaagcacctgaggacagtgcaccagaattctatcttccactgccccacccaggcccaggctgcagtagcccagtgctttgagcgggagcagcaacactttggacaacccagcagctactttttgcagctgccacaggccatggagctgaaccgagaccacatgatccgtagcctgcagtcagtgggcctcaagctctggatctcccaggggagctacttcctcattgcagacatctcagacttcaagagcaagatgcctgacctgcccggagctgaggatgagccttatgacagacgctttgccaagtggatgatcaaaaacatgggcttggtgggcatccctgtctccacattcttcagtcggccccatcagaaggactttgaccactacatccgattctgttttgtcaaggacaaggccacactccaggccatggatgagagactgcgcaagtggaaagagctccaaccctgaggaggctgccctcagccccacctcgaacacaggcctcagctatgccttagcacagggatggcactggagggcccagctgtgtgactgcgcatgtttccagaaaagaggccatgtcttgggggttgaagccatcctttcccagtgtccatctggactattgggttgggggccagttctgggtctcagcctactcctctgtaggttgcctgtagggttttgattgtttctggcctctctgcctggggcaggaaagggtggaatatcaggcccggtaccaccttagccctgccgaggctctgtggcttctctacatcttctcctgtgacctcaggatgttgctactgttcctaataaagttttaagttattaggaccctc

SEQ ID NO: 957 - DNA, 1754 bp, Homo sapiens; identical to SEQ ID NO: 228

SEQ ID NO: 958 - DNA, 1754 bp, Homo sapiens; identical to SEQ ID NO: 228

SEQ ID NO: 959 - DNA, 2012 bp, Homo sapiens
cggtcccacttgcctctaaatgcagacagtgagtacgtcacattaagtgaccaccacttcttagggactgccagtagcagggggaatgatacggccagttgaggcatttagcagtggaactgttctataagtgggtatttattttcgacaaggtaggccacactggcctcatctgctctgagtcttcctaatatagaaagtcatggaagttgtatgtagatgcctttgtgttaaatcttgcttcagaatcagagtgggatctctgggacacataccaagctcgtttgccttcattctgtattttgtttctttgataaaataatgattttcattttttgcttaatactacattcttaagctacatagactctctccgtgatacaacaggcagtgcatgctgttactagttcttttctcctagtaaggcctacacagttatttcttgttaagaagctgtgagatgtgacctccttcctgcttagcatcacacagaaaatctgatttcaagtatctcacttattcccaccgcatcactgtcagaacagcctctcagattcacccaaagaaatacaatcatgatgactcaaatggtgtataactcaggtccagtaattctgcataggtaatcagttaaaacagtttaaacatgaaattgattcaaatattgataatgttttactaatgtgagcaacagtgttatggaaaggattcatttgactcttgtggaatgggcctgtctaatttttcttaacataatcggtaaagtattactaagaaatgctccatcctgtttctgtccaagaaaggaaagcgatacctcctgctccctgaggtggcactagggatttaaccgggaccaggaccgcctgcacgctaggcaagcactctacaaatgagatatattcctagaccaacaaatccttttgttcttctaataatttgtttaaggagtttaatcttgaactccagatgcccgcatagtcttatctgggaagatattcgtttatttctcattttgtcacccatatctacttttttcttagaggttgatgtacagatatctaaaaatatgtattcctcaatgatcttatttaggagagtgtttttactgtcatatttaaaaatagattattttcatgctgccttctgttgattttggcaaattgtataatagatcgtcttgatcattgcattttttgtcttgtaaatgtatattttgtctttgtaaattcatttacttctcaggtgtgactttatggttgactttaaacgtatgaatgaatgaggatgtaaggaaagctgtcttatttattaacgtagatgcggtaaaagaagggtatttgggtttgagcttctttttatttgagtatagaaagttatgcttttaagtaaagaaatagcaagtacagaggaaataaaaataaatagaagaaagtaaaaaggaaaaaaaccctaagaaaatgaaacaaaaaaaaagatgtaagcgaaagcaagccacatgtgatggccaatgcctgtgaccagcacttgagagactaaggcaggaagaatactacaagcttgaggcatgtgtggtttcagagtgactttgaagcccgtctgggccatagagtaagaccaggttttgttctggagaacataaacaagagtatatgataattacagggaatagtctcatggatttacataaagacaacaagagggcttaagtggagatgtgtggtgctgaagtcttgcagattggaggcagggcctgacagagcatccaccattaccaaaatccttaggatctgggagcaacaccatagctgccaagggtctgatttaaatctgttctactcactggtcagcatattggactctgctactaatataatgttaaaatagcatacctggtaaaaataaaatacacgaagtgtgttgagtgtttgagatgaaagtaaaagaaaacctaaatcattgggcaacttgggaggaaaatcattttaaataaacaaatcacatcattaccg

SEQ ID NO: 960 - DNA, 2383 bp, Homo sapiens; identical to SEQ ID NO: 390

SEQ ID NO: 961 - DNA, 1524 bp, Homo sapiens; identical to SEQ ID NO: 256

SEQ ID NO: 962 - DNA, 1524 bp, Homo sapiens; identical to SEQ ID NO: 256

SEQ ID NO: 963 - DNA, 4557 bp, Homo sapiens
cttctacttcagacactgtgcgctctcccggaccgtcgtgcgccgctccccgtcgccttccaggactgggaaaggggagaggaggacggtgccacgtccgacggcctcctgggctgggggcagggtctgccgctcgcccttggcaccagtccctgcgacccatccccgagcctcgccctcctcctccctgctcgaagaggtctccctccttcgcgggatctgagtccctgtcttcatttttctcctagccacgtccctccccgagaagggacgagccgggagcatcatgcgtttcgcctggaccgtgctctttctgggacagctgcagttctgtccccttctccgctgcgccccgcaggccccgcgcgagcctcccgccgcccccggtgcctggcgccagacaatccaatgggagaacaacgggcaggtgttcagtctgttgagcctgggggcgcagtaccagcctcagcgacgccgcgactccagcgccactgccccgagagccgacggcaacgctgcagcacagccacgcacgcccattctgctgctgcgtgacaaccgcactgcctctgcccgtgcgaggactccaagcccatctggggtcgccgcgggtcgtccccggcccgcagcccgccactggttccaagttggtttctcgccgtcgggggccggcgatggagcctcaaggcgcgcagcgaaccggactgcgtcgccacagcctccgcagctcagtaatctgaggccacccagccacgtagatcgcatggtgggcgacgacccctacaatccctacaagtactccgacgacaacccctattataactactatgacacttatgagagaccccggtccgggagcaggcaccgacctggatatggcaccggttacttccagtacggtctcccggacctggtacccgatccctactacatccaggcatccacgtacgtacaaaagatgtctatgtacaacctgagatgcgctgcggaagaaaactgcctggccagttcagcatatagggcggatgtcagagactatgaccacagggtactgctacgatttcctcagagagtgaaaaaccaagggacgtctgacttcttaccaagccgcccccgctactcctgggagtggcacagctgccaccaacattaccacagcatggatgaattcagccactacgacctgctggatgccagcacacagaggagagtggccgagggccacaaagcaagcttctgtctggaggacacttcctgtgattatgggtaccacagacgatttgcctgtactgcacacacacaggggttgagtcccggatgttatgatacttatgcagcagacatagactgccagtggattgatattacagatgtacaacccggaaattacattctaaaggtcagtgtaaaccccagctacctggtgcctgaatcagactacagtaacaatgtcgtacgctgtgaaattcgctacacaggacatcacgcctatgcctcaggctgcaccatttcaccgtattagaaagaagctcaccttcccaaaggatgaagcagtacctggtgtttggacctatgaaaaccgtagattagcttaagtaggaagacttagatattttaaaaggcaaacggaaaaacaacaaagaaggttttgtttggactctttcacaacaaatcacataactggattttgagtgtttaaatcagcattagattggcacattttaaatacttattcatgttgctttatgaagtaatggtgtttcaattctgtgggtgcatagtgggctctttcaaagaattctgaatttcttaccttcttttgaaattatagtgcaaaaagaagaggatattttaatgaatgagccacaatttgaactgattactttctaaattgccagacccatgagacaatgatgatgggtttgtatttgcctcaacatagattcgctttttaaaaagggtgttcctattgtataggcaaaaatggatacacttggtgctgaggaagggtcaaatactaactattgttgtcacgaaatataggtctacagcagagagatggtgagtatatattcagatagttacatccctatataaactatgtttacattttagatgcttttctttctgttaattgcttaatctcactctgacttgaggtacaacttctgttttggaatgaattagataattccagattctggtttgataattgttgacattcccccatgctactttttctgagggcagaaacgtctaatgtgacgactcttcacattaccattacgaggatacacagcacagcgaaatcattccgatgacaggtgtgatagatggagagctaacatgcaactgccgagtgtttcactgttagccagaactaagtcactgcccacacagcaattacaccatgaatctctaacatcacaaccttctttcaaatactgtaaaaaaaaaaatactggaaaacctttttagatttgtttcaatctaccacgcttctgaaatgttcagctattaaggggaatgtcaatatatatatacagcccaaattagcgaagcccaaattagggaagcacatagcatggcatacttgagaggttggcaaacaagagggaagcaggtactttctgcaaaaacagggactgtgcgccacaatgagaccgctgtgaccttacttcaaactgtgaaactgtgtgcagcagtaggatttggagtcttaaattcagaaggagcagaaagaaagagagttagacgtttgaattcctggtgcttatgctgacgttttctctcatttgccagcattaaaatctcaagtaaggtgtctcctgtgccaggacgtgtcaggtagacctttctcagtgagctggaatcctgccttctgtgtcatagagttgtaagagcagcagtttctacccatcatgctgtgtactcactgctgcagagcaagtgggaggggccagagatgggccgtccccaggggcggatagcgcggtacacttaattctcttctgcctgaaagcacacttccccgtaagcgaatacagacagaactttgattgagctggtatctgaccgataggattgcttctttgatgtacctctttgacctagctagcatttcagctttgatactgcagaacgatcttttcaaattataatcattctgatagagatatcttaatagacgtgcttttaaaaacaaaacggaaactactgtcagtatgaatactgagccagactggcattcatagatttaacaacttgtatttctaagattcttaactctataaaagtaatatggcttttagatatataggataataatttcagtgagaccgttatctctttactcaacattatgttagggacagtataagccaagcacttacctgttacacattggagactaaaacgactgcccccaaccttagtaagtatgaaaactagactcacattatttcatttttaactgctaaaagtatgtctatagaatttaaaatttaagcactactatttgtcctggccacatttttcaaaaattaagttaaaagttattaattatatacaggtgtgtatttctaataattaaaatacctttcaaatccatggaatgtctgccttttaaatgtaatttgggcttttttgtttgattctttttcacttaactagctgtttatttgtaaacatttctttccacgatttaaaaacacttccaatcggctttacttcctgatttagcacttcctattttgacccttgggcatctgttcttcgtttaattggtgtagaataatgataaaaatcccaagctagtctaaccaaactgcattcttaagagtactaagtgggaatgatgcaaagttcatcaagaattgaaaagaagccggtctttgcactaaggaagacagcataattaagtcttctcgttgccatctgagtaatatcatgatatggggaccgcagaatccatctccggtgggatgatggtatagctttcctagttccagaaaaaatctccttcacattttatataataatttaatcacaatgtccatcgaattcttccttaggcattctttgtaacagtagtgtgctgctctttaaaatattaacctctgacacatgtgtgaacctcattccctgtggtcactaaaatttcttccccactgagcatcaatctttagcagattttaggaaaatactgaattcttagtcaggaaatattttaggaataatcttgctaacagtatattaagtaataaaattacccactctatgtgtgtttcattttttttaatttacatagacaatggtttttataaagcaatgatttcaatttttcccagctacccaaagtcctggttaatttgtgaacacaaattttgttagccttcaagtttaaacggtgctgaattgtcttaacttgaatgtaaaaatggattaaggcttatctcatgggacacaaacatgtcccatatgactgcttgctgcgtactaggggacatgccatttggtgttaaattgtctataataaagttcggtttctcccaaaaa

SEQ ID NO: 964 - DNA, 195 bp, Homo sapiens
actctcactatgaatcctgtgtggagagggaatgtgacattttaaagttatttcttttgagagacttgttttggatgctcccccaagcctccctctcccctgcactgtaaaatgttgggattatgggtcacaggaagaagtggtttttttagttgaatttttttttttaacattcctcctgaatgtaaatttgta

SEQ ID NO: 965 - DNA, 664 bp, Homo sapiens
ggcacgagtctccttgctgcttttgtgctctcccgctcgccatggccagccttaaggacctggaagggaagtggcgtctggtggaaagccacgggtttgaggactacatgaaggaactaggagtagggctggctcttaggaagatgggtgccatggccaaaccagactgcatcattaccctcgacaacaacaacctcaccgtcaaaactgagagcacagtgaagacgaccgtgttttcttgcaccttgggagagaagtttgatgaaaccacagctgatggcaggaaaactgagacggtctgcaccttcacagacggtgccctggtccagcaccagaagtgggaagggaaagaaagcacgataacgagaaaactgaaggacgggaagatggtggtggagtgcgtcatgaacaatgccatctgtactcgggtctatgagaaggtacaatgaggactggctaactcgtcatcctggacagcagtcagctggctgagggaatagctcaattcaatgagcaggtcgtacagaaccacactgcttcacttctttggttttatttttcatgacttttcatcatagacactttacccgaaacccatgtcagaccgttggtttacccaggatcattcctttggttagtaaataaatgcgtttgtgctaattca

SEQ ID NO: 966 - DNA, 1178 bp, Homo sapiens; identical to SEQ ID NO: 351

SEQ ID NO: 967 - DNA, 1129 bp, Homo sapiens
cagaccccctcgtaggacagactgttagaacaggctgtgcttcatctctgtttagagaactcaagcaattgctgccatgccggggaagccagtccttcactacttcgatggcagggggagaatggagcccatccggtggctcctggctgcagctggagtagagtttgaagaaaattttctgaaaactcgggatgacctggccaggttaagaagtgatgggagtttgatgtttgaacaagtgcccatggtggagattgacgggatgaagctggtgcagaccaaagccattctcaactacattgccaccaaatacaacctctatgggaaggacatgaaggagagagccctcatcgacatgtatgcagaaggtgtggccgatctggagttgatggttctctattacccctacatgccccctggggagaaagaggcgagtcttgccaagatcaaggacaaagcaaggaaccgttacttccctgcctatgagaaggtgttgaagagccacggacaagattatctcgttggcaacaagctgagcagggctgatgtttccctggttgaacttctctaccatgtggaagagatggacccaggcattgtggacaacttccctctgctaaaggccctgagaaccagagtcagcaacctccccacagtgaagaagtttcttcagcctggcagccagaggaagccttttgatgatgagaaatgtgtagaatcagcgaagaagatcttcagttaattcagtcagctatggatacactgtacccacaaagccagcctcagaaagctctgcaacaatgaagtattttgactaaatgttgaccgtacttattgggagggtaacatgttttctaaggcttctgtgttaattcatatagacatgactcatgaggaattgctgggatgccatctagttgagttaaaacctcaatctcgatcacttcctcggatattttcttaatgttcaataaaacaaaacaagcttcttagacgctggagtatccaaacattgtcatgaaatagctgtcatatccttgtcaaacagcgtcacgtagaaaccctcgtgtcaaactctcttacgcaaaagtaatctttccttatggagagtgtcctttctctcgtgccg

SEQ ID NO: 968 - DNA, 1695 bp, Homo sapiens
atgtccgtcagggtgactcagaaatcctacaagatgtccacctccggtccccgggccttcagcagccgctcgttcacgagtggacccggtgcccgcatcagctcttccagcttttcccgggtgggcagcagcagcagcagcttccgcggaagcctgggcggctttggcggggctggtgtcgggggcatcacggcggtcacggtgaaccagagcctgctgaaccccttgaagctggaggtggaccccaacatccaggctgtgcgcactcaggagaaagagcagatcaagaccctgaacaacaagttcgcctctttcattgacaaggtacgcttcctggagcagcagaacaagatgctggagaccaaatggagcttgctgcaacagcagaagacatccaggagcaacatggacaacatgtttgagagttacatcaacaacctccgtcggcagctggaagccctgggccaggagaagctgaagctggaggtggagcttggcaacatgcagggcctggtggaggacttcaagaataagtatgaggatgagatcaacaagcgtacagagatggagaatgagtttgtcctcatcaagaaggatgtggatgaagcctacatgaacaaggtggagcttgagtcccgcctggaaggactgaccgacgagatcaacttcctccggcagatccatgaagaggagatccgtgagctgcagtctcagatctcagacacgtctgtggtgctgtccatggacaacagccgctccctggacatggacagcatcattgctgaagttcgtgcccagtatgaggagatcgccaaccgcagccgagctgaggccgaaaccatgtaccagattaagtatgaggaattgcagaccctggctgggaagcacggggatgatctacgtcgctcgaagacggagatctctgagatgaaccgtaacatcagccgcctgcaggcggagattgacgccctcaaaggccagagggcaaccctggaggcggccattgctgatgcagagcagcgtggggaactggccgtgaaggatgccaatgccaagctggaggatctgaagaatgccctgcagaaggccaagcaggacatggcccggcagctgcgcgagtaccaggagctgatgaacgtcaagctggcgcttgacatcgagatcgccacctaccgcaagctgctggagggcgaggagagcaggctggagtctgggatgcagaacatgagcatccacacgaagaccaccagtggctacgcaggaggactgagttcatcctacgggggactcactagccccggcttcagctatggaatgagctctttccagcccggcttcggttctgttgggggatccagcacttatagccgcaccaaggctgtggtcgtgaagaagattgaaacccgagatgggaaactggtgtctgagtcttctgacatcatgtccaagtgaatggccactgaagtcattgccagcctgaggtcctgcagctgctcaggggtcaaggggagacagctgtatggcagagtgcagggaactagggaccagccagagtaccagccctaaacctctggccaaccttgggaggaatttcctatctgggatatgccaatgcccaactcaattgtattttccaaaataaagcctcagctggctgtatcaactaaaaaaaaaaaaaaaaaaaaaaaaaaaaaa

SEQ ID NO: 969 - DNA, 1309 bp, Homo sapiens; identical to SEQ ID NO: 442

SEQ ID NO: 970 - DNA, 1770 bp, Homo sapiens; identical to SEQ ID NO: 37

SEQ ID NO: 971 - DNA, 1274 bp, Homo sapiens
aagtcacatattaaccgatggatacactaaactggtttcctgcaacctgagggtggctcctgataggtaccaatttggaccatggaacagagtccaggaatgtttccgaccctgccctaaagaaggcagacacttctttagcagccgttgtccagaccccctcgtaggacagactgttagaacaggctgtgcttcatctctgtttagagaactcaagcaattgctgccatgccggggaagccagtccttcactacttcgatggcagggggagaatggagcccatccggtggctcctggctgcagctggagtagagtttgaagaaaattttctgaaaactcgggatgacctggccaggttaagaagtgatgggagtttgatgtttgaacaagtgcccatggtggagattgacgggatgaagctggtgcagaccaaagccattctcaactacattgccaccaaatacaacctctatgggaaggacatgaaggagagagccctcatcgacatgtatgcagaaggtgtggccgatctggagttgatggttctctattacccctacatgccccctggggagaaagaggcgagtcttgccaagatcaaggacaaagcaaggaaccgttacttccctgcctatgagaaggtgttgaagagccacggacaagattatctcgttggcaacaagctgagcagggctgatgtttccctggttgaacttctctaccatgtggaagagatggacccaggcattgtggacaacttccctctgctaaaggccctgagaaccagagtcagcaacctccccacagtgaagaagtttcttcagcctggcagccagaggaagccttttgatgatgagaaatgtgtagaatcagcgaagaagatcttcagttaattcagtcagctatggatacactgtacccacaaagccagcctcagaaagctctgcaacaatgaagtattttgactaaatgttgaccgtacttattgggagggtaacatgttttctaaggcttctgtgttaattcatatagacatgactcatgaggaattgctgggatgccatctagttgagttaaaacctcaatctcgatcacttcctcggatattttcttaatgttcaataaaacaaaacaagcttcttagacgctggagtatccaaacattgtcatgaaatagctgtcatatccttgtcaaacagcgtcacgtagaaaccctcgtgtcaaactctcttacgcaaaagtaatctttccttatggagagtgtcctttctct

SEQ ID NO: 972 - DNA, 1564 bp, Homo sapiens; identical to SEQ ID NO: 279

SEQ ID NO: 973 - DNA, 1790 bp, Homo sapiens
aattcaggcagatagtgaatggctatcgccaccagaagcacaagaagggaaggttatttcaggaacctctgatgctgcagatccccaagactgtggactggagagaaaagggttgtgtgactcctgtgaagaatcagggccagtgtggttcttgctgggcttttagcgcatcgggttgcctagaaggacagatgttccttaagactggcaaactgatctcactgagtgaacagaaccttgtggactgttctcacgatcaaggcaatcagggctgtaatggaggcctgatggattttgctttccagtacattaaggaaaatggaggtctggactcagaggagtcttatccctatgaagcaaaggatggatcttgtaaatacagagctgagtatgctgtggctaacgacacagggtttgtggatatccctcagcaagagaaagccctcatgaaggctgtagcgacggtggggcctatttctgttgccatggatgcaagccatccgtctctccagttctatagttcaggtatctactatgaacccaactgtagcagcaaggacctcgaccatggggttctggtggttggctatggttatgaaggaacagattcaaataaggataaatactggcttgtcaaaaacagctggggtaaagaatggggtatggatggctacatcaaaatagccaaagaccggaacaaccactgcggacttgccaccgcagccagctatcctatcgtgaattgatggacagcgataataaggacttacggacactacatccgaaggagttcatcttaaaactgaccaaacccgtctctgagtgagaccatggtacttgaatcgttcaggatccaagtcacgatttaaattctgttgacatttttacatgggttaaatgttaccactacttaaaactcctgttataaacagctttataatattggacacttaatgcttaattctgattctggaatatttgttttataaaagttgtataaaactttctttaccttttaaaaataaattttagctcagtgcatgtgtgtgtgtatgggttaggggaacttcctgtgtgaaatgtgttcacaaatgtttgagactaaagactgactgattccagatgtccggactgattcgggtgtcagtggtagacctggggaaaggtgacaggtgctctggatggagccttctgattttacctcagcgtcctgtcaggttaggtatgtgtaagtaaatctagcttatggggtaattgttttttctttatttgtgtgagtatgtgtgtgtggaggtcagagaacaactcatttctacagtgttgatcctagcgatcaaaatcaggttgtcaggctggaccacaggtgccttttactactgaggtatcttgccagccccactggttttaagtgacgtataattacatatgtttatgtagtacaatataatgtgttgtgatacgtgtatactatgaaatgatctgatagttcacctcaaatattttattactttgttgaacttttctagctgtttctaaaatacacagtatattatcattggacctgtcttgttaatgtagcccaggctggccttaagccataatcttccttctcagccttctgtgagctaagataaaaaaaaaaaatcatgtaatgttatacccagtctcaagtcttatatctggcaaaccttgacagtccagaagaactagagtaaattgtttgacagtcctctcaactttcctaattctgtgacctttcaatatagttcctcctgttgtgaccccaaaaa

SEQ ID NO: 974 - DNA, 1790 bp, Homo sapiens; identical to SEQ ID NO: 973

SEQ ID NO: 975 - DNA, 1925 bp, Homo sapiens
catgcccgaggtcgaggatacttgttccttggcttctccagcctcggtctgccgaacccagcacctccatcttcgctgcagcgtcgacttcgctcgccgggcactgaccgggaccgccgcgctcacggtccagtcacaggaggataatctgcgcacgctgactttggatacaaaagaccttacgatagaaaaagtggtgatcaacggacaagaagtcaaatacactcttggagaaagccagggttacaaaggatcgccgatggaaatctcccttcccatcgctctgagcaaaaatcaagaggtcgttatagagatttccttcgagacgtctcccaagtcctcggcccttcagtggctcactcccgagcagacttcaggaaagcagcatccatacctcttcagtcagtgggaggccatccactgcagggcaatcctcccttgccaagacacttctgtgaagttaacctacaccgcagaggtatctgtccccaaagaactggtggctctcatgagtgccatccgtgatggagaagcccctgacccagaagaccccagcaggaagatatacagatttaaccagagggttcccataccgtgctacctgattgctttagtcgttggcgctttagaaagcaggcaaattggcccaagaactctggtgtggtctgagaaagagcaggtggagaagtctgcttatgaattctctgagactgaatccatgcttaaaattgcagaagatctggggggaccctatgtttggggacagtacgacctgttggtcctgcccccatccttcccgtacggaggcatggagaatccttgtctcacattcgtaacgcctactctattggcaggtgacaagtcactctctaatgttattgcacacgaaatatcgcatagctggacagggaacctagtgactaacaagacttgggatcacttctggttaaacgaaggacataccgtctatttagagcgccacatttgtgggcggttgtttggggaaaaattcagacatttccacgctttaggaggatggggagagctacagaacacgataaagactttcggggagtcccatcccttcaccaagctcgtggtcgatctgaaggacgtagaccccgatgtggcctactcctccattccctacgagaagggcttcgccttgctcttctacctggaacaacttcttgggggaccggaggtgttcctaggattcttaaaggcttatgtggagaagttttcctaccagagcgtaaccactgatgactggaagagtttcctgtatgctcactttaaagataaggtggatcttctcaatcaagttgattggaatgcctggctctatgctcctggcctgcctcctgtcaaacccaattacgatgtgactctcacgaatgcctgcatcgccttaagtcaaagatgggtcactgccaaagaggaagatttaaattcattcagcatcgaagacctgaaggacctctcgtcccatcagctgaatgagttcctggcacaggtgcttcagagggcacctcttcccttggggcacataaagcgaatgcaagaggtgtacaacttcaatgccattaacaattctgaaatacgattcagatggttacggctctgcattcaatcgaagtgggaagaagcaattcctttggccctaaagatggcaactgaacaaggaaggatgaaatttacacgacctctattcaaggacctcgctgccttcgacaaatcccacgatcaagctgtccgcacctaccaggaacataaagcctgtatgcatcccgtgaccgccatgctggtggggaaagatctgaaagtggattaaggaactgagtgttgctgatttcagaaaattcctttttttaagaaaaaaaatcgaacctattaagaaatacaaaattttagctctcgttgta

SEQ ID NO: 976 - DNA, 1162 bp, Homo sapiens
gaattccggactgcagagccatgcagggtctcggggccctgttcttgttgctgactgcctgcctcactttgaaggctgacaatgtgccaacactgccagatatccaggttcaggagaacttcaatgaggcccggatctatggaaaatggttcaacctggcggtgggctccacctgcccgtggctgaggcggattaagaacaagatgagcgtgagcacactggtgctgcaggagggggcgacagaagccgagatcagcgtgaccagtactcaatggcggaaaggtgtctgcgaggagatctccggggtgtatcagaagacagacattgacggaaagttcctttaccacaaatccaaatggaatgcaaccttggaatcttatgtggtccacaccaactatgacgaatatgccattttccttaccaagaagttcagccaccgccacggacccaccatcactgccaagctctatggccgggaaccacagctgagggacagccttctgcaggagttcagggaggtggccctgagtgtgggcatccctgagaactccattgtttttatggccgacagaggagaatgtgtccctggggatcgggaggtagagtccacttcatttgcaagagcccggcgggcagtgctgccccaagagaatgaagggtcagggagtgagccactcataactgggaccctcaagaaagaagactcctgccagctgaactactcagaaggtccctgcctggggatgcagcagaagtattactacaatggcgcctccatggcctgcgagaccttccagtatggcggctgcctaggcaatggtaacaacttcgcctccgagaaggaatgcctgcagacgtgccggaccatagcggcctgcaatctccccatagtccaaggcccctgccgagcctttgcagaactctgggcatttgatgcagcgcaagggaagtgcatccaattcatctatgggggctgcaaaggcaacggcaacaagttctactctgagaaggagtgcaaggagtactgtggagtccctggtgatgggtacgaggagctaacacgcagttgaaggagccggtctgcaagccagagggtagccacggtccgtcactgagcagtccagcttagatgatctggacccaataaaacaaggcggaattc

SEQ ID NO: 977 - DNA, 1162 bp, Homo sapiens; identical to SEQ ID NO: 976

SEQ ID NO: 978 - DNA, 3378 bp, Homo sapiens
atggagcaaagctacggaggttatggggcatggagtgctggacctgccaacacccagggtacatatggaagtggtgtggccagctggcaaggttatgaaaactacagctactacaatgcccagaacaccagtgtccctacaggaacaccctatagttatggcccagcctcgtgggaggccaccaaggccagtgatggtggcctggcagctgggagttctgctatgcatgtggcctcttttgccccagagccatgcaccgacaactctgactcgctcattgccaagatcaatcaacgtttggacatgttgtccaaggaaggaggcaggggtgggatcagcagcggtggggagggcatgcaggaccgagacagctccttccgcttccagccatatgagtcctacgactccaggccctgtatgcctgagcatactccctaccgccccagctacagttacgattatgactttgacttgggaactgaccgcaatggtagttttggcgggacattcaacgactgtcgggacccaaccccagagcgaggcgcccttgatggtttcttaaggggccggggccagggccgcttccaggaccggagcaactcgagcaccttcatacgtagtgaccccttcatgccaccctcagcctcctcagagcccttatccaccacctggagtgagctgaactacatgggtggacgtggtctaggtgggccctccaccaacaggccgcctccttccctcttctcccagtccatggcccctgactacagcatgatgggcatgcagggggtgggcggttttggtggcaccatgccttatggatgtggccggtcccagactcggatacgggattggcccagaaggagggggtttgaacgctttggaccagacaacatgggcaggaagcggaagccgtttccattgtatgaagaacctgatgccaagctggcccgtgctgacagtgaaggagacctctctgaaaacgatgatggagctggtgacttacggtcaggagatgaagaatttaggggggaggacgacctctgtgactcccggaagcagagaggagaaaaggaggacgaggatgaggatgtgaagaagagacgggagaagcaaaggaggagagatcggatgcgggaccgagcagctgacaggattcagtttgcctgttctgtgtgcaaatttcgtagctttgaagatgaagaaatccaaaagcatctgcaaagtaaatttcataaagagaccttgcggtttataagtaccaaactacctgacaagacagtagaatttctccaggagtatatcataaacaggaataagaaaattgagaaacggcgtcaggagttgttggagaaggaaagccctaaacccaaaccagatccattcaaagggattggccaggagcatttcttcaaaaggattgaagccgcacactgcctggcctgtgacatgctgattcctgcacagcaccagctcctgcagcggcatctgcactctgtggaccataaccataatcgaaggttggctgctgaacaattcaagaaaacaagtctccatgtggctaagagtgttctgaacaacaagcatatagtgaagatgttagaaaaatacctcaagggcgaggatccttttgtcaatgaaactgctgatcttgagacagaaggagatgagaacttaggagaggagaaggagacaccagaggaggtagctgcggaagtcttagcagaggtgatcacagcagcggtgaaggctgtagagggggatggagaaccagctgcagagcatagtgacgtcctagctgaagtggaagggcctgtggacaccgccgaggctggtagtgactcccacactggaaagctgctagaagaacagacctgtgaaacagcatctgaaaccaggaacatggaagacatggccagaggtgaggctgctgaggccagaaatgaagcagctgtgccagcagcagccgccggaagcccagtacctgtcatagccatcccaggaatcctggaagatgagctggaacaaactgatgcagaggccaaagatactcccacagaataatgatcttctcttccctgtttcaagggacgtgttatatcatgtgttctttgttttataagctgtactggggtgtgtgttattcggtggaaagactgggccatttccttcccagtgtacctcaaggattgatgctatacagtagatggcttcccacctctgttagaaatacaaaaagaggtaaaccattttcccaagtggcctttgatggctatctgtgcactgcagctagaatagtaagagtagatcttcctgacacttgttgagtcctgaattggacagaatgtgaggatttttgttttgttttgtgttgtgtttttgtttggtcttcgtttcactttattttgctttttctcttgggaagcaatctgatacgaacatagcttacttgagaaaaaaattatttaggggaattcccttattcacctctgcatggttgatgtgggacatacacagttcaaccatccatgtgtgcaagagctgagattgtgccctccaccaataaacagtcttgtttcaataaacatcaggccatttcctaactgtcggcattgaaatagcatcttgcttggaccaagctagctttagaactcaatcctactgtttagcctctgcagtgctggtgccatgagtgtacggccatgctcagtggggctttggttttgcaatacactgtatcctatgttcctctccagctgtggcagcattagacagatgacatggcagtgacttggctgtgtttgagatggtccctcaggcttccactggaaggacccgcacctgagcctgtagatcgaagacactgctaaggccttggttctcactgttcagtgcttgctaatcagttggtgttcgtctcccacctctattagtggatgttttgttgtttgctctctttccttttgttatttccacctaaaggtatttagaaaaccatggaattactccattgatgaaaaacaaatgtggacttcatagttgggatctgtctgtcaaaagctcaaaccgttaagtaaaagtgtttgactaaagcaagtagtagtccgagcaaggagctagcatgtctctaaagcagcatgtgctaaggttttacaggctcagaatgatgggtctcccccgttttgaagttacaatgctgtgtccatttgtacacagctcacatcttggaaacatgagccagtgagggactacggaagagatggtagaccatcacagcaatttcatcagcacgtctgtctgttaaggagcattactggggatgtgatagggactttggaatatcattgtcaaaacaagcaataaattgatgccacggag

SEQ ID NO: 979 - DNA, 604 bp, Homo sapiens
cggagttttgtgaattacggtagtgggtaagacctgagttcctccagctcctacctactttcagctgactagaagggcaaggatggtagatgctttctgtgccacctggaagctgacagacagccagaattttgatgagtacatgaaggctctgggcgtgggctttgccactaggcaagtgggaaatgtgaccaaaccaacggtgattatcagtcaggaaggcggcaaagtggtgatccggacacaatgcacattcaagaacacagagatcagtttccagctgggagaagagtttgaggaaacaagcatagatgacaggaactgtaagtctgtgattcggttggatggagacaagctcattcatgtgcagaagtgggatggcaaagaaacaaattgtgtcagagaaattaaggatggcaaaatggttgtgactctcacctttggggatgtcgttgctgttcgctgttatgaaaaggcatagaagaaatgccgggtcttttgaaaacttggtttcctgaagttccagagttatccagctactgaagcactggtcactaattataagtttgtctttggtgtggaggcagaaaattataatttaagg

SEQ ID NO: 980 - DNA, 2153 bp, Homo sapiens
gagggctaaaatggagctgctgggattcactacgcttgctcttgtggtttcggtgacttgcctcagcctcctttcagtgtggacaaaactgcgcactagggggaggctgcccccggggccccaccccccttcccattattgggaatctactgcaactgaacctcaaggacatcctgcatcgctttccaagctggccaaagagtacgggcctgtttacacgctgtactttggaacctctcctactgtggtcctgcatggctatgatgtggtgaaggaggcgcttctccagcaaggggatgagttcctcgggagaggacctctgcccatcatcgaagatacccataagggatatggactcattttcagtaatggagagaggtggaaagtcatgcgacgcttctccctcatgactctgaggaacttcggaatggggaagagaagcctagaggagagggtgcaggaggaagcctggtgccttgtggaggaattacaaaaaacaaaagctcagccctttgaccccaccttcatcctggcctgtgctccctgcaacgtgatctgctccattcttttcaacgatcgattccagtacaacgacaagacgttcctcaaccttatggatcttttaaataaaaattttcaacaagtgaactccgtgtggtgccagatgtacaacctttggccaacgatcataaagtatctccctggaaagcatatagaatttgcaaaaagaattgatgatgttaaaaacttcattcttgaaaaagtgaaggaacaccagaagtccctggatcctgccaaccctcgggactacattgactgttttctcagcaagattgaggaggagaaggacaacctgaagtctgagttccatctggagaacttggctgtctgtgggtctaacttgtttacggcaggcaccgagacaaccagcaccaccctgagattcgggctcctgctccttatgaagtatccagaggtgcaagccaaagttcatgaggaacttgaccgtgtgattggacgccaccaaccccccagcatgaaggacaagatgaagctgccttataccgatgctgtattgcatgagattcaaagatacatcactctggttggttccagtctgccccatgctgtggtccaggacacaaaattcagagactatgtcatccccaagggtactactgtactcccgatgctgtcttccgtcatgctggatcaaaaggagtttgccaacccagagaagtttgatccaggacactttctggataaaaatggctgcttcaagaagacagactactttgttcccttctcccttggaaagcgggcctgtgttggtgagagtttggcccggatggagctcttcctgttcttcaccacccttctgcaaaagttttccctgaagactctggtggagcccaaggaccttgacatcaagcctattactaccgggattatcaatttgccgccaccttacaagctgtgccttgttcctagataagggtttatccttttaatcattcaaatcaaagtaattgtttcctttttctataaatattctttttatgctaagcactgcctaggccagaaacatcatgcatgaaaaccacatggacatttatttcgatttaaaaatctaggtcttaaaagcttccaggacacaggcagtgtgtctgtgtccctcaactgctctagaaaccaggccccaagcacaactgacaccagatatgcaagaccctcatcagacgccacctacaagtagcactgtgtgctcttctgtagctttggaaatagaattgttttctgtcattgtttcaatagagaaattaatgtaatggcctacgttcattttcctgttcacacttaaaaacatttacatgatttgtgccacattcacaaaataaattctcaccctgacaataaaaaaaaaggaattcctgttggccgagttgtcagtcagcgtgaactctgccaccagctccctaagaaggggcattgaaggacccttcataggtttttggaggtaataaagccaggatatcatagagccttaagcggaccattgcagcactagctttcaggtgggggaattccaaaaaaaaaaaaaaaaaaaaaaaaaaaaaaaaaaaaaaaaaaaaaaaaaaaaaaaaaaaggaatt

SEQ ID NO: 981 - DNA, 1612 bp, Homo sapiens
aggcaaagggcaactgcttggaatttcagaaaatctgaaaccatgaggcatctatggctgctgctcctgtctgtttccttagttcaaactcaagctgcaactactgactccgataaagtggacctctcgattgcccgtggtcatcgacctgttgacaggagaaaggaagagcctcctagcctaagacctgcccctcctcctatcagcggaggtggctatcgagcccgtccagccaaagttgatgcaggtcagaagaaagtggaacgaaaaccccctgatgcaggaggctgtgttcacggtgacggagacatgggagtgctatgtgctacagggtgtgagttgcgtcaaactttgctaaaccacgaaaggccaatcaaaaacagtattgctgagttaaatagcaacataaactctgtttatgagacctcttcggtcacctttcagtacctgactctgctgaaagacatgtggaaaaagaagcaggcacaagttaaagataatgaaaatgtcataaatgagtattcctccattttggaagaccagaaattatatattgatgagactgtgaacgataatatcccccttaatcttcgtgtgctccgctcaatcctggaggacctgagaagcaaaatgcaaaaattggagtctgacatctcagctcagacggaatactgccacactccatgcaccgtcaactgcaacatcccggtggtgtctgggaaagagtgtgaagagatcattcggaagggaggtgagacatccgaaatgtatctcattcagcctgacacctccagcaaaccatacagagtgtactgcgacatgaagaccgaaaacggaggatggacggtcatacagaaccgtcaggatggcagcgtcgactttggcaggaaatgggacccatacaaaaaaggatttggaaatattgcaaccaacgaagatacgaagaagtactgtggcttgccaggcgaatattggcttggcaatgataagattagccagctcaccaggataggacccacagaactcctaatcgaaatggaggactggaaaggagacaaggtgaaggcacactatggaggcttcacggtgcagaccgaggccaacaagtaccaagtgtcagtgaacaagtacaaagggactgctggcaacgccctcatggaaggggcctctcagctggtgggggagaacagaaccatgaccatccacaacggcatgttcttcagcacctacgacagggacaacgatggctgggtaactacagatccaagaaagcagtgctcaaaagaagatggcggcggctggtggtataacagatgccatgcagccaatccgaatggcagatactactggggtggcctttacagctgggacatgtccaagcacggcacagatgatggtgtggtgtggatgaactggaagggatcgtggtactccatgagaaggatgtctatgaagatcaggcccgtcttcccacagcaatagtcccccaagcatagactttcagccttctatgtctgacattttttacattatgttattggaattttctttgatacattatatccactaatgctcaaaacaatggctgagtgtgtctttttttttttttttt

SEQ ID NO: 982 - DNA, 1589 bp, Homo sapiens
aattggcttgaaaccagttgtagggggttcgaatcagaatctctcgatcactcaaattggctcctgattgcacttcgtgaagggaagattgaagttcagtttaagaatgagttttcaacccaaatcacaactggaggcaatgttattaacaatggtatatggaatatggtgtctgtggaagaattagacgacagtgttagcattaaaatagctaaggaggccgtgatgaatattaataaacttgggagtctttttaaacctaccgatggatttctggacaccaaaatatactttgcaggattacctcggaaggtggaaagtgcactcattaagccgattaatcctcgtctggatggatgtatacgaggctggaacttgatgaaacaaggagctttgggtgcaaaggaaatagttgaaggaaaacaaaataaacattgcttcctcactgtggagaagggctcctactaccctggttcaggaattgctcagttcagcatagactacaataatgtaactaatgcagaggattggcaaataaatgtgaccttgaatattcgcccgttcactggcactggggtcatgcttgctttagtttctggggacacagtgccctttgccttgtccttggtggattctggctctggaacttctcaggacattctggtatttgttgaaaattcagtagcagctcacttagaagccataactctgtgctcggaacagccatcccagctgaaatgtaacattaacagaaatggactggaactgtggaccccagttagaaaagacgtcatttactctaaagatctccaaaggcaactcgccatcttggacaaaacaatgaaaggaaccgtggccacttacctgggtggcgttccagatatttccttcagtgccacaccagtgaatgctttttacagcggctgcatggaagtgaacatcaacggggtacagttggatctggatgaagccatttccaaacataatgacattagagctcactcctgtccgtcagtgaggaaaatccagaagaacttctaaagtctgtttcctgggcttctaatctctcttttcatattgtaattatgctcttgttcatgtttccatcaccaaatggcaggattacatgtgttatatgcatgtttaaatatgatgtggtactttgtccttcagatttttgttatataagtcgcatttttgaaaagtcttgtactcactgctgtctagaaattaaataacaaaacacatgaaacatttaaatttcaatttatttcctataaatcttccagtgcgtcacaggcaacataatctgctccattgtctttggagagcgctttgactacagagaccgccagttcctgcgcttgctcgacctgttgtataggaccttttccctcataagctcattctccagccagatgtttgaggtctactctgacttcctgaagtactttcctggtgtccacagagaaatctacaaaaacctgaaggaagtcctcgactacattgatcatagtgtggagaaccacagggccactttggaccccaatgctccccgagactttatcgatactttccttctggaattc

SEQ ID NO: 983 - DNA, 1846 bp, Homo sapiens
cggatgcctgggaagtggatttctgctctgctcctgctgcaaataagtttctgctttaaatctgggaactgcggaaaggtgttggtatggccgatggaatatagtcactggatgaatataaagataatactagaggaacttgtacagaagggccatgaagtcactgttctgagaccttcagcttctgtctttcttgatcccaaggaaacttctcaccttaaatttgtaacttttcctacatctttcagtagtcatgacctggaaaatttttttacaaggtttgtgagtgtatggacttatgagttgccaagagacacatgtttgtcatattttctttatctacaagatacgattgatgaatattctgactactgtctgactgtttgtaaagaagcagtttcaaacaaacagttcatgacaaaactacaggaatccaaatttgatgtcgttttctcagatgccattggtccctgtggagagctgatagctgaactgctccagattccttttctgtacagtcttcgcttctctcctggctacacaattgaaaagtacattggaggagttctattccctccttcctatgtacccatgattttttcaggattagctggccaaatgacattcatagagagggtacacaatatgatatgtatgctttattttgacttttggttccaaacatttagagagaagaaatgggatccattttacagcaaaactttaggaaggcccaccacattagctgagataatgggcaaagcagaaatgtggctcattagatcctactgggatttggagtttccccacccaatatcgccaaatgttgactacattggaggactccactgcaaacctgctaaacccttgcccaaggatattgaagacttcgtccagagctctggagagcatggtgtggtggtgttttctctggggtcaatggtcaggaacatgacagaagaaaaggccaacatcattgcatgggcccttgcccagattccacaaaaggttctttggagatttgacggcaaaaaacccaccaccttaggacccaataccagactctacaagtggcttccccaaaatgatcttcttggtcatccaaaaaccaaagcctttgtaacgcatggtggagccaatggcatctatgaggcgatccatcatggaatccctatgattggcattcccttatttggagagcaacatgataacattgcccacatggtggccaaaggagcagccgccacagtaaatttcaggacaatgtcaaagtcagatttgctcaatgcactggaggaagacatagacaatcctttttataaaaagaatgctatgtggttgtcaaccattcaccatgaccagcctacgaagccactggacagagctgtcttctggattgagtttgtcatgcgccacaaaggggccttgcacctgagatcacttggacataaccttccctggtacctgtaccactctctggatgtgattggattcctactttcctgtgtggcagtcactgtagtccttgctctaaagtgctttttatttgtttatcgattctttgtaaagaaggaaaagaaaacaaagaatgagtagagctcaatgataatgcatcacatgaatgaaatttgttcatcattttaagttatgaaccaccttctaaaaattcattaataactttacagaagcatattgtaattttgtatcatgtaaaaagacatataattctgaggcttctgatatgtgatcaaagaatcccatcatttattttaattttcaaactattcaatgtaaaacaatttgcctgtgtagaaaaatatataaataaagatttaattgaaaaaaa

SEQ ID NO: 984 - DNA, 1201 bp, Homo sapiens
cgccaccaccccgccatgctcagagccaagatgctcgggagaggcccctacaagcccttagccatcctcaggcacatgggacctctctgtgccacaaggccacagcactggcgcttccagcattcctacgcagagaaacacagcaactgtgcccggcaccctctctggactggcccagtgtcctcaccgggaggcacccagcagtctcccattaatatccagtggacggatagtgtctatgacccgaagctggcaccgctcagggtctcctatgatgctgcgtcctgcagatacctctggaacactggttacttcttccaggtggagtttgacgattcctgtgaggagtcagggatcagtggtgggcctctgggaaaccactacaggctgaagcagtttcacttccactggggagcaacagatgaatggggctctgagcacatggtggacggccatgcctacccggctgagctccatttggttcactggaattccatgaaatatgaaaattacaagaaagccaccacgggggagaatggactggcggtgattggagtgtttctgaagctcggggcccatcacgaggccctgcagaggctggtggacatcttgccggaagtaagacacaaggacacacaggtgaccatggggccctttgacccttcttgcctgctgcctgcctgccgggattactggacctaccctggctccctcaccaccccaccactggctgagtcagtcacctggattgtgcacaagatgcccattgaggtgtccccgagccagctgtccacattccgtacactcttgttctccgggcgaggtgaggacgaggaggtgatggtgaacaacttccgcccgctccaaccactcaggggccgcaacgttcgctcctccttccaggtccccagggtgggaacaaagtcttgatctcaggatgaggtctgtaaggataggcagagcggatggaaaagggggtgcgcatttccagggtgcgacgcctggattaaaaaaaaaatggctgcagagatggctcaggggttaagagcactgactgctcttccagaggtcctgagttcagttcccagtaaccacatggtggctcacaaccatctgtaatgggatccgatgccctcttctggtgtgtctgaagagagcgacactgcactcatatgcattaaattaataaatctttaaaaaa

SEQ ID NO: 985 - DNA, 2187 bp, Homo sapiens
ggagagggaacagcgtgccgcccaggcgacagagctggtgcgggcgccgggagccgcctaggaccgcggcgccggatagagaagggcgggagccgctggtgcccgcctgtcccacgaacggcaggaatgtgacccctcgagcgcgcgccggagcacccctcgcgtggctcccagggctccggttgctcaggcctggacgggtttagctccgggtttagctgggagctgctggattgctgtgcatccccactgggcacccgggcacgcccagccttggctctgcgaagccctgtgccgtaatgtggctggagagtactcttcatgctgccgaggcttgtgacatcttcggctaaatcctccatcctggagaatatgaaagtgctacttgggttcatttgtctcattgtgcctctgctgtcgctggagaccgacaaatgcacggagtatccaaatgaggtcatttcattttcatccgtaaatgaaattgacattcgcagctgtcctcttactccaaacgaaatgcatggcggcaccataatctggtataaaaatgacagcaagacccccatatcagcggacaaggactccaggattcatcagcagaatgaacatctttggtttgttcccgccaagatggaggattcaggctattactattgtataatgagaaactcaacatactgcctcaaaactaaaataaccatgagtgtcttagagaatgaccctggcttgtgctataacacacaagccagcttcatacagcggctccatgttgcaggggatggaagtcttgtgtgcccttatctggattttttcaaagatgaaaataacgagttacccaaagttcagtggtataagaactgtaaacctctgcctcttgacgatggaaacttctttggattcaagaataaactgatggtgatgaatgtggctgaagagcacagagggaactatacttgccgcacgtcctacacataccaggggaagcaatatcccgtcacacgagtaataacatttatcacaatagatgacagcaagagggacagacctgtgattatgagcccacggaatgagacgatggaagctgacccaggatccacgatacaactgatctgcaacgtcacgggccagttcaccgaccttgtctactggaagtggaatgggtcggaaattgaatgggacgatccaatcctagccgaagactatcagtttttggaacacccttcagccaaaagaaagtacactctcattacaacacttaacgtttcagaggtcaaaagccagttttatcgctatccgttcatctgcttcgttaagaacactcatattctggagactgcacacgtacggttagtatacccagttcctgacttcaagaattacctcatcgggggctttgccatcttcacagctacagccgtgttctgtgcttgcatctacaaagtcttcaaggttgatatagtgctttggtacagggactcctgctctgattttcttccccgaaaagcttcagatggaaggacctatgatgcctatgttctttatcccaagacctacggagagggatcctttgcatacttggatacttttgtgtttaagctgttgccggaggtcttggagggacagtttggatacaaactgttcatttgtggaagggatgactatgttggggaagataccatcgaggttactaatgaaaacgtaaagagaagcagaaggctgatcatcattttagtgagagatatgggaagcttcagctgtctgggccagtcatctgaagagcagatagcaatatacgatgccctcatccgggaaggaattaaaatcatcctgctcgagttggagaaaatccaagactatgagaaaatgccagaatctattcaattcattaagcagaagcatggggccatttgctggtcaggagactttaaagaaagaccgcagtctgccaagaccaggttctggaaaaacttaagataccagatgccagcccaacggcgatcaccactgtctaaacatcacttattaaccctggatcctgtgctggacactaaggagaaactgcaggcggagacacacttaccacttggctagtgtgggaaaggcgggcgggccaagactggtggagtgcctcctgtcgtcagatgctgcagctggctctgcctcccagtaaaacagtcatgaaac

SEQ ID NO: 986 - DNA, 1812 bp, Homo sapiens
ctcagagatgaggagcagacagctgagagcattaagaaccaaatgacggtgaaggaatgggaaaaggtgtttgaaatgagtcaggaccaaaacctgtaccacaatctctgcactagcctcttccctacgatccacggcaatgatgaagtaaaacgtggcgtcttgctgatgctgttcggtggcgttcccaagacaacaggggaaggaacctctcttcgtggggatataaatgtttgcattgttggggatccaagtacagctaagagccagtttctcaagcatgtggatgagttcagtcccagagctgtgtataccagtggcaaggcctccagtgcttccggcttgacagcagctgtggtgagagatgaggaatctcacgagtttgtcatcgaggctggagcgttgatgctggctgataacggtgtctgttgcattgatgagtttgataagatggacatgcgggaccaagttgctattcacgaagctatggagcagcagaccatatctatcactaaagccggagtgaaggcaactctgaatgccaggacatccattttagctgcagcaaaccctgtcagcggacactacgacaggtcaaaatctctgaaacagaacatcaatctgtcagcgcccatcatgtcccgctttgacctcttcttcattttggtggatgagtgcaatgaggtgacagattatgctattgccaggcgcatagtagacttgcattcgaggatcgaagaatcgatagaccgggtttattcccttgatgatataagaaggtatcttctcttcgcccgacagtttaagcccaagatttccaaagagtcagaggacttcattgtggagcagtacaaacgcctccgccagagggatggctctgggatcaccaagtcgtcgtggagaatcactgtgagacagcttgagagcatgatccgactctcagaatcgatggcccgcatgcactgctgtgatgaggtccagcctaaacatgtgaaggaagcttttcgattactgaataaatcgatcatccgtgtagaaacgcctgacgtcaatctagatcaagaggaagagatccagatggagacggatgagggaccaggaggcatcaatggtcatgctgacagccctgcccctgtgaacgggttcaatggctctggtgaagatgccagtcaggagaccgttcccaagccctcccttaggttggcctttgctgaatactgccgaatctctaacctcatcgtgcttcacctcaggaaaatggaagaagaggaggatgagtcagccctaaagaggagcgagctggtcaactggtacctgaaggaaatcgagtcggaaatcgactctgaagaagagctcataaataagaagaggatcatagagaaggttgttcatcgtctcacacactacgatcacgttctgattgagctcacccaggctggactgaaaggctccagtgaaggaagcgagagctatgaggaagatccttacctggtagtcaacccgaactacttgcttgaagattgagatatagaaggtgacttacggccaggaaccgggggtggcctaccttagccgggacctgggcatgcactgagaccgtttctggagcgatgcttgggggacagttgagaagagacagctgaacagtgagtaatgccgtgatttcatgctggacatgcgtgggtactttgtgcttttcctacacatgaaataaaaagtatttcagaaaacatgattgggatccaacttcaacaggacaagacaaagtgcccacgcatgtgccagcattaaatccacggccatgaactcagc

SEQ ID NO: 987 - DNA, 3046 bp, Homo sapiens; identical to SEQ ID NO: 178

SEQ ID NO: 988 - DNA, 3508 bp, Homo sapiens
ggcacgaggctcgctgcgggctccaggcttggccgcacttgctcaccagtggtgcgcccggggcttttgtggcttagccggcctgggctttgtgtccgagttctgctccgtgcctgcggcgcttctcccggtcagggattcccgaggcggcgtgcgcagcccccgggaccagcgagcgatcgagcgagcgcgccggcttgagcggtggcgactgcgaggggccgaggaggagagaaggagggggacgagatgccggagttcctagaggacccttcggtcctgaccaaagacaagttgaagagcgagttggtcgccaacaacgtgacgctcccggccggcgagcagcgcaaggacgtgtacgtgcagctctacctgcagcacctcacggcgcgcaaccggccgccgctcgccgcgggagccaacagcaaagggccgcccgacttctcgagcgacgaggagcgcgagcccaccccagtgcttggctccggggcctccgtgggtcgcggccgcggcgccgtcggcaggaaagccacaaagaaaactgataagcccaggccagaagataaagatgatctggatgtgacagagctctctaacgaagaacttctggaacagcttgtgagatatggagtgaatcctggtcccattgtgggaaccaccaggaagctgtatgagaagaagctgttgaagctgagggaacagggagcagaatcgagatcctctactcctctcccaacagtctcttcctctgcagaaaacacgaggcagaatggaagtaatgactctgacagatacagtgacaatgacgaagactctaaaatagagctcaagcttgagaagagagagccgctaaagggcagagcaaagactccagtaacactcaagcaaaggaggattgagcacaatcagagctattctgaagctggagtaactgagactgaatggacaagtggatcttcaaaaggcggacctctgcaggcattaactagggagtccacgagagggtcgagaagaactccaaggagaagggtggaaccctcacagcattttcgtgtagatggtgcagtaatttcagagagtactcccatagctgagactataaaggcttccagcaacgactccttagtggccaataggttgactggaaatttcaagcatgcatcttctattctgccaatcactgaattctcagacataaccagaagaacaccaaagaaaccattgacaagagctgaagtgggagaaaaaacagaggaaagaagagtagaaagggatattctgaaggaaatgttcccgtatgaagcctctactccaaccggaattagtgctagttgccgcagaccaatcaaaggtgctgccggccggccgctcgagctcagtgacttcaggatggaagaatcgttctcatctaagtacgtcccgaagtacgttcccttggcagacgtcaagtcggaaaagacaaagaagggacgctccgttcccatgtggataaaaatgctgctgtttgctctcgtggcgggttttttgtttttggtctatcaagctatggaaaccaaccaaggaaaccccttcactaattttcttcaagatactaaaatatccaactgaagaaatcatttcggcacatccgactcgatctcctgtttttaataactgtagaaaagcatctgtgtccacttgttggccgaagaactaaattgtgatttcacctcagtaaaggtagcgctgcgttggaaagcagacaggaagcttacctggatctcatttcaatgttttggactttggagatcacactgtgccatatgaataatttttttagctccagaacttttttgtaggctttatttttttaatgtggacatcttatttcacttttggggaaaatgcattgttttgtgtatttgaaaaataaggcaaaacatggtgatgtaatgtgaagctacacattaaatacttggaattcttacagaaaagatttatgacttattctctgctgagtaaaaatgttagaaatgtgaatggcgttcagtaagagaagcggtcacgagttgtgcttccttccatatgcagcggtttgtccgtggaaggtccagcaataagctcttctgggactcctgtcgtgcgtgtggtgtcgctggcgcacctgccacactgctcactagaatattttcatatcatgaaagtgctacgtcattaaagccctgagtacacttagttttccactgggatcttggagagcaacatagatacctgcttagggagcctttagctggctgcgcgcgtctaagagaccgagggctagctagaagctcccgttgggatcctgtgcttgtatttacggcaaagcatctatcccgtccatccagctcatcagactgttctgtaggtaaataagcatgggggtgtttgtttagagttagaaactaaacaccagtcccctccacttcagtccgattccattgtcgtcttttaaccaaaaaaaagttttcctggccagggatttttgttttgctttgttttagatggagttggggtgttgagatttttgtttgttttaggcatgtaattcctgatgtaatttgatttaaaagtataactgacttgcttttaaatcacatatatagtagctaatgcttaatttgtaatttcaaataaggtgggcattatggttctgtgtattcctgaagtgattaacgatatccttatggttgtcttttttagctgaaatttacctcatgtatggcttagatgatgttgcagtcgatttaaattttggtaaaaatcaagtacagcataaacatttttaactaaatcatttaagttgcaattttacagtcattgaccacaaagcacactaaaaatgtaaattatttttaataacatccggaatgtaaagacagttttaatttttacaaaggaggaagctgaatatgaatatctagaccagcacacaactttgacttaatgtttactgtgtttagcttatagatatgtcgtaggcatttgaagtaaacttctgccccagagaccagaacatggaccagaacatgtaggcctggtccgtgaggcgtgtggggagctgacttagatctgaagtgctttcctctcaaagacaagccacaaggggcatgttttactcaactttccctctctacagtgacagccatctttctttgttctcagacacagcttctcatattgctttcagtcatctgtttataattaaaaattgtgagaagccccatttgatgtttaaaaacaggggtgggggttaatctggcttcacatttctataaggtcgctctggatagggaagtgtggtccagtacagtgaaagtcggaccaggtaaaacatgccattttctttttaaaagcgtgtacttggtcttttgtctgtgtctgttttattccactagagtaaatgtgtccttgatgtaaatgcaaagcatttattaattcgtagatgtagactttacaatataattcaataataaagtaattaacctct

SEQ ID NO: 989 - DNA, 454 bp, Homo sapiens; identical to SEQ ID NO: 31

SEQ ID NO: 990 - DNA, 599 bp, Homo sapiens
ggaaaggggagatgctgtgcagtacatcccagccatcatcaagtctaaggctgagcccctgtatgaacttgtgacagccacagactttgcgtactccagcacagtgaaacagaacatgaagaaggccctagaagaattccagaaggaggtcagctcctgccgctgtgctccgtgcaggaacaatggagtccccatcctgaaagaatcccgctgtgagtgcatctgtcctgtcggtcttcaaggtgtagcctgtgaggttaccaatcggaaagatatccccatagatgggaagtggagttgctggtctgactggtctccatgctctggaggacgcaaaacaagacaaaggcagtgcaacaacccggcacctcagagaggaggcagcccctgctcaggtcctgcttcagaaacactcaactgttaaagggagggaacacagccggcaggtgatcatcagggctctaaccctctcacacttagccaggctttagcacaccagctcccacccagggctaccacaacaaaaagcaatgccactctgccctttaaaggtttagtttcttcagtgcatgttaattccagtaaacagtgggtggagc

SEQ ID NO: 991 - DNA, 599 bp, Homo sapiens; identical to SEQ ID NO: 990

SEQ ID NO: 992 - DNA, 428 bp, Homo sapiens
caccctaacctaaaccttttgaattttgaattaatgggtaccctatagaaaaaatgacctgcggaaaaccaaacagtgaagggaaagaaggaaagaattccaattgacacaatttaaataaaatatggcttttcaaataaaggaagagaagtttcttttgggcacacaatctaaacaatatttatgtataattcagctcttatttggcttaaatgggcttagtgggaaatgttatcatttttactattttctacagagaaaatattttccagtttatcaagtaactctggactttggaattacctgtttttatgttccagctgtctatatagttgtttctctgaaattgtacataaaatgtttttacattaaaatgaattactgtataaagtactgcattatgcataataaagatactaatgctttat

SEQ ID NO: 993 - DNA, 976 bp, Homo sapiens; identical to SEQ ID NO: 305

SEQ ID NO: 994 - DNA, 1848 bp, Homo sapiens
gagcccggagctgaaccaggagaagccacaggacatgtcacggctttgagaggcaggccctaagaaaaggtgcagctttctgagcacatcaaatgtcaaagagtggatggagaccaagtccatcaattagaagataagtctcaaatggagaaccggtgcctccccaagaaagttccaggtttctgttcctttcggtatggactggctatccttttgcacttctgtaacattgtcatcatggctcagcgagtgtgcctgaacctcacaatggtagccatggtgaataaaacagagccaccccatttatctaacaagtctgtagcagagatgctggataatgtaaagaaccctgtgcattcctggagtcttgatattcaagggcttattctcagttctgtcttcttgggtatggttgtgattcaagttcctgttgggtacctatctggagcatacccaatgaagaaaataattgggtcttcattgttcctcagctctgtgctgtccctgctcatcccaccagctgcacaagtcggagcagctttggtcattgtatgccgagtactccaaggaatagcccagggagcagtgtcaacaggccagcatggaatatgggtcaaatgggcacctcccttggaacgaggcagacttacctctatgactctatcagggtttgtaatgggaccatttattgccctgcttgtgagtggcttcatctgtgatcttctgggttggcccatggttttctacatctttggtattgttgggtgtgttctgagtcttttctggttcatccttttctttgatgaccccaacaaccacccatatatgagcagcagtgagaaggattacatcacatcctctctcatgcaacaggtgcactcgggcagacaatctctgccaatcaaagctatgcttaagtctcttccactctgggccattatcctcaatagctttgctttcatatggtcgaacaatcttctggttacatacacgccaacatttattagcaccacgcttcatgttaatgttagagagaatgggctgctgtccagcctcccctatctgcttgcctacatctgtggtatcgtagcaggtcagatgtcagacttcctcctgtcaaggaagattttcagcgtagttgctgtccggaaactcttcaccacactagggattttctgtcctgtgatttttgtcgtgtgcctgctctacctgagctacaacttctacagcaccgtcattttccttacacttgccaactcgacacttagcttttccttctgtggacaacttatcaatgccttggatattgctcccagatattatggatttctaaaggcagtcacagctttaattggaatatttgggggcctaatttcttcaactcttgctgggttgatccttaatcaggatccagaatatgcttggcataaaaacttcttcttgatggcaggcattaacgtgacatgcctggctttctaccttctgtttgcaaaaggagatattcaggactgggctaaagaaacaaaaaccacacggctgtgaagttagtagaagagtgagcacctgagaagcatgaggtcagcatccatattgaaaggaagaggattctgtgtgggactgcagtcatgggagtcatgaacacctgaagaccggtagcctgaagcttttaagggagtcattgcctcccactttagtctgagtgattcttttgcactgtgtattgtgtgtaacaagttatacttctgactttaaagaggaatctgtctgtcttcctatgatccaataaacaaacataagccaaaactttactccactactttatgaaaaaaaaaaaaaaaaaaaaaaaaa

SEQ ID NO: 995 - DNA, 1848 bp, Homo sapiens; identical to SEQ ID NO: 994

SEQ ID NO: 996 - DNA, 4024 bp, Homo sapiens
gttccctgtcagtggaggcaacggccgtcagaggcggcggccacggcttgaggcgacggggcgaagatgctgaagttccaaacagttcgagggggcctgaggctcctgggtgtccgccgatcctccacagcccccgttgcctccccaaatgtccggcgtctggagtacaagcccatcaagaaagtaatggtggccaacagaggtgagattgccatccgagtgtttcgtgcctgcacagagctgggtatccgcacagtggctgtctactcggagcaggacacagggcagatgcaccggcagaaagctgatgaagcctaccttattggccgtgggctggctcctgtgcaagcctacctgcacattccagacatcattaaggtggccaaggagaatggtgtagatgctgtgcaccctggctatgggttcctctcagagagagcagactttgcccaggcctgccaagatgctggagtccgattcattggtccaagcccagaggtggtccgcaagatgggagacaaggtggaagcccgggccattgccattgctgcaggcgttccagtggtccctggcactaattcccccatcaattccctgcatgaggcacacgagttctctaacacctatggtttccctattatcttcaaggctgcctatggaggtgggggccgtggcatgagggttgtgcatagctacgaggagctggaagagaattacacccgggcctactctgaggccttggcagcctttgggaatggggcattgtttgtggagaaattcattgagaagccaagacacattgaggtgcagatcctaggggaccaatatgggaacatcttgcacttgtatgagcgggactgctccatccagcggcggcaccagaaggtcgtcgagattgcccctgctacccacctggacccccaacttcggtcacgcctcaccagtgactctgtcaaacttgccaagcaggttggctatgagaatgcaggcactgtcgagttcctggtggacaagcatggcaagcactacttcatcgaggtcaattcccgcctgcaggtggagcacacggtcactgaggagattacagatgtggacctggtccatgctcagatccatgtctccgaaggccggagcctgcctgacctggggctgcggcaggaaaacatccgaatcaatggttgtgccattcagtgtcgggtcaccactgaggaccctgcacgcagcttccagccagacactggccgcattgaggttttccggagtggtgagggcatgggcatccgcctggacaatgcctcagcattccagggagctgtcatatccccccactatgactccctgctggtcaaagtcattgcccatggcaaagaccaccctacagctgccaccaagatgagcagagccctggcggagttccgtgtccgaggtgtaaagaccaacatccccttcctgcagaatgttctcaacaaccagcagttcctagcgggcattgtggacacccagttcatcgatgagaaccccgagctgttccagctgcggcctgcacagaaccgggcccagaagttgctacattaccttggacacgtcatggtcaatggccctaccactccaatccccgtcaaggtcagtcccagccctgtggaccccattgttcctgtggtgcccataggcccacccccagctggtttcagagacatccttctgcgagaggggccagagggctttgccagagctgtgcggaatcaccaggggctgctgctaatggacacaaccttccgggatgcccaccagtcactacttgccactagagtgcgcacacacgatctcaaaaagattgcaccctacgttgcccacaacttcaacaacctcttcagcatagagaactggggaggagccacatttgacgtggccatgcgcttcttgtatgagtgcccctggcggcggctccaggagctccgggagctcatccccaacatcccattccagatgctactgaggggggccaatgctgtgggctacaccaactaccctgacaacgtggtcttcaagttctgtgaggtggccaaagagaatggcatggacgtcttccggatctttgactcccttaactacctgccaaacatgctgctgggcatggaagcagctggcagtgctgggggtgtggtggaagctgccatctcctacacgggtgacgtggctgaccccagtcgcactaaatactcactggagtactacatgggcttagctgaagaactggtgcgagccggcactcacatcctctgcattaaggacatggcaggcctgctgaagcctgcagcatgcaccatgctggtcagctccctccgggaccggttccccgacctcccactgcacatccatacccatgacacatcagggtcaggtgtggcagccatgttggcctgtgcacaagctggggctgatgttgtggatgtggcagtcgactctatgtctgggatgacctcacagcccagcatgggggccctggtggcctgtaccaaagggactcctctggacacagaggtacccctggagcgtgtgtttgactacagtgagtattgggaaggggctcgggggctgtatgcagcctttgattgcacggctaccatgaagtctggcaactcagacgtgtatgagaatgagatcccagggggccagtacaccaacctacacttccaggcccacagcatgggacttggctccaagttcaaggaggtcaagaaggcctatgtggaggctaaccagatgctgggggacctcatcaaggtgacaccatcctccaagattgtgggggatctggcccagttcatggtgcagaacgggttgagccgggcagaggcagaagctcaggcagaagagctgtccttcccccgctctgtggtggagttcctccagggctacattggcattccccatgggggtttccctgaacccttccgttctaaggtgctaaaggacctgccaagaatagaagggaggcctggagcctccctccctcccttgaacctgaaggagctggagaaggacctgattgataggcatggagaggaggtgaccccagaggacgttctctctgcagccatgtaccctgatgtctttgctcagttcaaagacttcacggctacctttggccccctggatagcctgaatactcgtctctttcttcaaggacccaaaattgcagaggagtttgaggttgagctggaacggggcaagaccttgcacatcaaagccctggctgtaagcgacctgaaccgtgctggccagaggcaggtgttctttgaactcaatgggcagcttcgatccattctggttaaagacacccaggccatgaaggagatgcacttccatcccaaggccttgaaggatgtgaagggccaaattggggcccctatgcctgggaaggtcatagacgtcaaggtggcagcaggagccaaggtggttaagggccagcccctctgtgtgctcagcgccatgaagatggagactgtggtgacttcgcccatggagggcactatccgaaaggttcacgtgaccaaggacatgactctggaaggcgatgacctcatcctagagattgagtgatcttactccagactggcagcctggccaaccctaccccaagcctctcaacagaagctgtgcagccagggcaggcccaggcagtacctgagctagcccttgaggtcctgtcccatgggacagcacacacactacctgcaatggccctcccattcccttcagctatttgtccttgtcttgctggcaaggcagttctcacatattcatctcttgccaaataagggtctgctcctcgtgggagaccacaggtgtacagtaggtggccttgtacctgggagaggggttctacctctgggggtagagggaagaagacctaattcataggtcctgggaaatttgctcaataaaagtggccttcccttgccctccaaaaaaaaaaaaaaaaaaaaaaaaaaaaaaaaaaaaaaaaaaaaaaaaaaaaaaa

SEQ ID NO: 997 - DNA, 4024 bp, Homo sapiens; identical to SEQ ID NO: 996

SEQ ID NO: 998 - DNA, 1998 bp, Homo sapiens
ggtgctgctgctgcatgtctgactgagaagggagccgagcatctgaggagcaagacatcagaaggctggagtcccttccctgactaggccagagctaaaaggacaaggctcagggctagcctctgcctatctagttcttttctccctgaagcttacaccatcctgtgggagccgatgcccgtctcattttgactcagagtctgtccctctgcttgtcttctacaaaccatgtggctgtacctgctggcactggtgggcctgtggaacctcctgcgcttgttcagggagaggaaggtggtaagccatctccaagacaaatatgtcttcatcacgggctgtgactcaggctttgggaacctgctggccagacagctggacaggagaggcatgagggtgctggctgcatgtctgactgagaagggagccgagcagctgaggagcaagacatcggacaggctggagacagtgatccttgatgtcaccaagacagagagtattgtggcagccactcagtgggtgaaggagcgagttgggaacacaggactctggggcctggtcaacaatgctggcatctccggccacctgggtcccaatgagtggatgaacaaacagaacattgcaagtgtgctggatgtgaacctgttgggcatgatcgaggtgactctgagcacggtgcccttagtgaggaaggcgaggggccgtgtggtcaacgttgccagcatcgcaggccgactgtctttttgtggtggtggttactgcatctccaagtatggtgtagaggccttctcagactccctcaggagagagctctcctattttggggtcaaggtggctattgtagagcctggcttcttcaggactgatgtgaccaatggtgtcacattatcatcaaacttccagatgctgtgggaccagaccagctcagaagtcagggaagtctatggcgagaactacctggcatcttatctgaaaatgctaaatggattggaccagaggtgcaacaaagatctgtctctggtgactgactgcatggagcacgccctgacttcctgtcaccctcgcacccggtactcagctggttgggatgccaagttcttctacctccccatgagctatctgcccacctttcttgtggatgcccttttctactggacttctccaaagcctgagaaagctctctgaagtctttacctatgtacataactgaggagatgttggtacagtgttagggaggggatcctgaggaggaggtcggagtgctgaggagggagggaggtcattcctctggggtttagtccacactcttcattttgctaattttcctgtgctactactcaaggctgactcgactgacccaagaaatagccaaagaattctgcgaagaagttcaaatacaaaagtgctggcagttgcctagcctctgggcaccatgacctaccatggcgatccacacaaatggggagtttgagaccagcttgtaccaaacactgccctgggtccccctgtgcaggaagtgcacatgccctggctagtttgtaccctatgcagcatagaagtgtccctgctctgaagtcacctgtgaccctggtgtcaggtttgagaagaatcactaataattctaacactcatgcttgaaggccaggtcgcagcctgggtgggagagtcggttacttgtggtgagaatatagtagaggatagagacattaattttttttaaatttactttgaagtcatggctcttcttttcttttttggagtcttttcctttttagagcatagcatgaggtgacctcttgttccctgtgatttaaacaatggcattgctggttggtgaggtttggattgcaggggtaaggggaatgtcctgagaagggtgtgcataggccagcaggaatttccttgcccgtctcagcccttctagccactgaggtgggaataactgctgtccattcaaaacttaacaacaacccctaaggcataagagcatgcatgcaggcc

SEQ ID NO: 999 - DNA, 632 bp, Homo sapiens
gtggacaagtgcaccccagaaatcaaaaggcatttctcttcaattcccttctgtcctgtgtctctggctcatggtgtccttgccaacatctagagtggaggtaatggaatagcaaatgagcaggtcacagcagcccaagcaggaagtgttatgttcacactttttgacaatgacagacaggaggtaggaacagctagagttgcataaccttagggagaggtgggttcagcatcaaaagtcttgctggagtgtgcagtgaagcataatataattagaccaggaccatgaaacctaatgtcctgctcctccttgctatcctcctcagcttcttgctattcctggtcagaggccatgcaaaggtccatggtcatcttccaccaggaccccgtcccctacccatcttgggaaacctcttgcagatggacagaggaggcctccttcagtctttcacgtaggtgagacctagaaggggccttagtgtgggcttccactggttttgtctttggagctaactcagtggaaatagaaagagactccttccagggtataggtttaggtgggaagattgctgagggtagggtgagatgctgactggtgatgtgtgctcatttgtgttcaagtcgacacacacc

SEQ ID NO: 1000 - DNA, 5313 bp, Homo sapiens
atgcggctcctctggggcctggcctgggcattcagcttcttcgcctcctctctgcagaagcccaggttgctcctgttctccccttctgtggttaatttggggacccccctgtcagtaggggtgcagctcctggatgcccctgcaggacaggaggtgaaaggctcagtgtacctcagaaacccaacaagcggtccctgctccccaaagaaggactttaagctcagctcgggaaatgactttgtgcttctcagacttgaggtcccactggaagatgtgaggaattgtggcctctttgacctacgcagagccccccacatccagctggtggcttactctccgtggctaaagaacacagcacccaaagccaccgagactcagggggtcaacctgcttttctcttcccgacgaggccacatctttgtgcagaccgatcagcctatctataaccctgggcagcgggtacgttatcgggtctttgcactggatcaaaagatgcgtccatctacggacaccctcacggtcacagtagagaactcccatggcctccgtgtacgcaagaaggtggtatttgcccccacatccatcttcacagatgacttcgtaattccagacatctcagagccggggacctggaagatctcagctaggttctcagatggcctcgagtccaacagaagcacccactttgaagtgaagaaatatgtccttcccaactttgaggtgaagcttactccttggaagccatatatcctgacagtgcctagctaccgtgaagaaatccagttagacatccaggccagatacgtctacgggaagcccgtgcagggcgtggcatatacccgcttcgcactcatggatgagcaggggaagaagactttccttcggggcctagagacccagaccaagttggtggaaggccagactcacatctccatctcaagggaccagttccaggctgccctgggtaaagtgaatactgagatcggagacctggaggggctgcggctctacgctgctgtagctgtcattgagtctccaggaggagagatggaggaagcagagctcacatcctggcccttcgtgtcatctgccttctccttggatctcagccacaccaagcagcatcttgtgcccggggcccccttcctgctgcaggccctggttcgagaaatgtcaggctctgaagcctctgatgttcctgtcaaagtctctgccacattgttatctgggtccgactcgaaagtccttgactttcaacagaacaccaacgggattggccaagtcagcttttctatccatgtcccgccaaccatcacagaacttcgactcttggtatctgccggttccctctacccagctgtagccaagctcactgtgcaagccccaccttcaagaggccctggctttctgtccattgagccactagaccttcggtcccctcgtgtgggggacaccttcatcctgaaccttcgaaccgtgggcatccctgtgcctaccttctctcattactactacatgatcatctccagaggccagatcatggccatgagtcgggagcccaggacgaccctgacctccatctctgtcttggtggaccatcacctggctccctctttctactttgtggcctacttctatcaccaaggactcccagtggccaactccctgctcatcaatgtccagcctggggactgtgagggcaagctggaattgaaggtggacggtgccaaggagtatcgaaatggggagagcatgaagctccaacttcaaactgactccgaagccctggtggcactgggagctgtggacacagctctgtatgctgtgggtggccggtctcacaaacccctcgacatgagcaaggtctttgaagtaatgaacagttataaccttggctgtggtcctggaggtggggacgatgcccttcaggtgttccagactgctggtttggccttttctgacggtgatcgactaactcagaccaaagaggacttgagctgtcccaaggagaagataagtcggcaaaagagaaatgttaacttccagaaggctattagcgagaagttgggccagtattcctctccagacaccaagcgctgctgccaggatgggatgaccaagctgcccatggcacgcacctgcgagcagcgggcagcccgagtgcctcagccggcctgccgggagcccttcttgtcctgttgcaagtttgctgaggacctccgcaggaaccagaccaggagccaggcgggcctcgcccgagcccagaacgtgatgcaggaggaggatctgatagatgaagatgacattcttgtgcgcagcttcttcccagagaactggctctggaaagtggaacctgtggaccgctccaaactgttgactgtgtggctccctgactctctgaccacatgggagattcatggtgtgagcctgtccaaaagcaaaggcctgtgtgtagccaagccaactcgcgtgcgagtgttccgagaattccacctgcacctgcgcctgcccatctctgtccggcgcttcgagcagcttgaattacggcccgttctctacaactatctgagtgaggacgtgactgtgagtgtccatgtgtccccagtggaggggctgtgcctggctggtggtggattgctggcccagcaggtatcagtgcctgcaggctccgcccggcctgtggccttctctgtggtacccacagctgctgccagcatgcccctgaaagtggtggctcgggggtcttttgatataggggatgctgtgtctaagattctccaaattgagaaggaaggggccatccacagagaagagatagtctacaacctcgaccccctaaataaccttggtcggagtttggaaatccctggcagctcagaccccaacgtcattcctgatggagatttcagcagcttcgtcagggttacagcctccgaacccttggagactttgggctctgaaggcgccttgtccccagggggagtggcctccctcctgaagctccccacgggctgcgcagaacaaaccatggtccttttggcccctaccctgactgcttcccgctacctggacaggaccgagcagtggagcaaactgccccctgagacaaaggaccatgctgtggatctgatccagaaaggccacatgcggatccagcagtttaggaagaaagatggctcctttggggcgtggttagaccgggacagcagcacctggctcacggcctttgtgctgaagattctgagtctggcccaggaacagattggtgactcccccgagaagctgcaagagaccgccgggtggctgctgggccagcagctggacgatggctcattccacgacccgtgtccggtcattcaaagaggcatgcaggggggcttggtggggaccgacgagacagtggcactgaccgcctttgtggtcatcgcccttcaccacgggctggccgtcttccaagacgagaactcgcagcagctgaagaagagggtggaagcctccatcatgaaggcaaactcgttcttggggcagaaggcaagtgctgggctcctgggtgcacacgcatccgccatcacagcctatgccctgacactgaccaaggcctcggaggacctgcggaatgttgcccacaacagcctgatggccatggctgaggaaacaggggaaaacctctactggggcttagccattggctctcaggacaacgttgtgtcatccaccgcagcccctcgtaatccctcagaacctgtgccccaggccccagccctgtggatcgaaaccacagcctacggcctgctacatctgctgctgcgggaggggaagggagaaatggctgacaaggcggcaacctggctcacacaccagggaagcttccaagggggattccgcagtacccaggacactgtggtcgccctggatgccctgtctgcatactggatcgcttcacacaccaccgaggagaaggcactcaatgtgactctcagctccatgggccgcaatgggtacaagtcccacctgctacagctgaacaaccaccaagtcaagggcctggaggaggagctgaagttctccctgggcagcaccatcaatgtgaaagtgggaggaaatagcaaaggcaccttaaagatccttcgtacctacaatgtcctggacatgaagaacacaacatgccaagaccttcggatagaagtgacaatcacaggctatgtggaatatacaagggaggccaacgaagactatgaatacgactatgatatgccagccgcagatgaccccagtgtccactcgcagcctgtgacacccctgcagctgtttgagggtcgtcggagccgccgcaggagggaggcccccaaggctgcggatgagcaggagtccagagtgcagtacaccgtgtgcatctggcggaacggtaacctggggctgtctgggatggccattgctgacatcaccctcctgagtggattccaagccctgagggctgacctggagaagctgacctccctctctgaccgttacgtgagtcactttgagaccgacgggccccacgtcctactgtactttgactcggtcccgaccacccgggagtgtgtgggctttggagctttgcaggaggtggccgtggggctggtgcagccagccagtgctgtcctgtatgactactacagccctgatcacaagtgctctgtgttctatgctggacccaccaagagcaagctcctctccaccttgtgctctgcagacgtctgccagtgcgctgaagggaagtgtcctcgacagcgaaggtcactggagcgaggggtggaggacaaggatggttaccggatgaagttcgcctgctattatccccgagtggagtatggcttccaggttaaggttctccgagaagacagcagatctgccttccgcctctttgagaccaagatcacccaagtcctgcatttcacaaaggatgccaaggcctccataggtcagacccgcaactttctggtccgggcttcttgccgccttcgtttggagcctagcaaagagtacttaatcatggggatggacggagtcaccagtgacctcaagggagacccccagtacttgctggactcaaacagttggatcgaggagatgccatctgagcgcctgtgcaggagcacccgtcagcgggcagcctgtggccagctcaatgacttcctgcaggagtacagaagccaggggtgccaggtgtgagggcgtcggactctggatccctgagctcagccccagggtcagggcctctcacgaagcagggcctgcttaacagggtaaataaaataaaacttttgacag

SEQ ID NO: 1001 - DNA, 847 bp, Homo sapiens
acgagctagacctccctagctccgcccgccgcgtgctcccgcctcccactcggaatgcctgtctggggcggtggaaataagtgcggggcctgcgggagaaccgtgtaccacgctgaagaggtgcagtgtgatgggcggacgttccaccgctgctgctttctgtgcatggtttgcaggaaaaatttagacagcacaacagtggcaattcatgatgaagagatctactgcaaatcatgctacggaaagaagtatggaccaaaaggctatggttatggccagggcgctggcacgctcaacatggaccgtggtgagaggctgggcatcaagccagagagtgctcaacctcacaggcctacaacaaatccaaacacttctaaatttgcccagaaatatggaggtgctgagaagtgctccagatgtggggattctgtgtatgctgctgagaagatcattggagctggaaagccctggcacaaaaactgtttccgatgtgccaagtgtgggaagagtctggagtctacaactctgactgagaaggaaggtgaaatctactgtaaagggtgctacgcaaagaactttgggcccaagggattcggctatggtcaaggagcaggggcccttgttcatgctcagtagtggtgtaaacccagtaagcatggcaaagaacctccattaatgtggatggccttaccgcactcaggctgtgcatcggccagcactcagcactgtgtagcacacacgctatgtgcacaatcgggctggacaggaagcactacactctcctgcccatccgctaacgtttaagaacgttcttttacatttggaataaaattttggtttgatttga

SEQ ID NO: 1002 - DNA, 2083 bp, Homo sapiens
ggttgcaaagaaatgcttctcaggactccagggctgcctaggaggagcggcatggcctcaggcgtgaccatcaccctagccattgcaatctttgccttggagatcaatgcacaggccccagagcccactccccgggaagagccatcagcagacgccctcctaccaatagactgcagaatgagcacatggagtcagtggtcacagtgtgatccttgcctcaaacaaaggtttcgctcaagaagcatggaagtctttggacagtttcagggaaaaagctgtgctgatgctttgggagacagacaacattgtgaacccactcaggagtgtgaagaggtacaggaaaactgtgggaatgactttcagtgtgaaacaggcaggtgcataaagaggaaacttctgtgtaatggtgacaacgactgtggagatttttctgatgagagtgactgtgaaagtgacccgcgcctcccgtgccgtgaccgggtggtagaagaatcggaactgggacgaacagcaggatatgggatcaacatcttagggatggatcccctgggcacgccttttgacaatgagttctacaatggactctgtgaccgggtacgggacggaaacactttgacatactatcgcaaaccttggaacgtagcatttctggcctatgaaaccaaggctgacaaaaatttcagaactgagaattatgaagaacagtttgaaatgttcaaaaccatcgtccgagacaggaccacgagttttaatgctaatttagctctaaaattcacaatcactgaagcacctataaaaaaagttggagttgatgaagtcagcccagaaaaaaactcttcaaagcctaaagactcttctgttgattttcaattttcatatttcaagaaagaaaattttcaacgattgtcatcctacttgtcacagacgaaaaagatgtttctgcacgtgagaggaatgattcaactggggagatttgtcatgaggaatcggggcgttatgctgacgacaactttcctggatgatgtaaaggctttaccagtttcctatgaaaagggcgaatattttgggtttttggagacttatgggactcactacagtagctctgggtccctgggagggctctacgaactgatctatgtcttggataaagcttccatgaaagagaaaggtgttgaactcagcgacgtaaagcggtgtcttgggtttaacctggatgtttctctatatacgcctctacaaactgccttagaaggaccatcattgacagccaatgttaatcacagtgattgcttaaagacaggggatggtaaagtagtaaacatcagccgcgatcacatcatagatgatgttatttcattcataagaggagggaccaggaagcaagcagttctcctgaaagagaagcttctcagaggagccaagacgattgatgtgaacgacttcatcaactgggcctcatccttggatgacgctccagctctcattagtcaaaaactgtcccctatctataatctcattcctttgacaatgaaagatgcatacgcaaagaaacagaatatggaaaaggctattgaagactatgttaatgaattcagtgctagaaagtgctacccatgtcaaaacggaggcacagcaattcttctggatggacagtgcatgtgctcctgcacaatcaagtttaaggggattgcctgcgaaatcagtaaacaaagatagccttcaggaaacaaagcaaaacctggttcacatggaaggtggaaaaaaggacaaaaaaagaagaagagagaggagagagaagagagagagaaaagaaaaaaccccaggactttccaacttagcatcctaccctagagcgaatcctcactgccaagtagaaagcagcttgcttcatggaaatcctaccaacctctgatgtcgtctctgtttcaggtctacagtgcctttctcccctctttaatgcctataatgcttccatttttttttttatccctaatgaagaatcggcagtgagatatgccaggactgccttttcccacaggcaatgccaatctctcgctaataaaacagagttaaattaaaaaca

SEQ ID NO: 1003 - DNA, 2011 bp, Homo sapiens
ggcacgaggcggcggcggcgcctggaggggaccagtgcggcggggagatgacggggacctaaagaggaacgaacaccgggagaggccgccaagtgcggcctgaggacaggcgcgcctgtcgactcagcgccaaacagggagagcccattacgtgactctgtcccgagggcctgggctcccagcccttgtactgcgcaaaactgggcggtgagagccggctgccggcgcgctgttgaactttgttttctctagagcgtggacctcggagccctccaggcagctgcttgccttgaaaaatgctggaggctgggcgggggcccaggcccgggaacctgttcttcctgtttcctgcctcagtcccagtagctggtccaggcctgtgcacatgcgagtgaagaactggaacggacgctgagcatccaagagcacctgctgcagcacctgctgtcacaccaagagcaggagctgatcgggtccagggcaatggcagcaggcctggactcctggaatagtaccatcaatggcacctgggagggggacgaactgggttacaaatgtcgcttcaacgaggacttcaagtatgtgctgctgcccgtgtcctatggcgtggtgtgcgtgctcgggctgtgcctgaacgtcgtggccctctacatcttcctgtgccgcctcaagacctggaacgcctccaccacctacatgtttcacctggcagtttctgactctctctacgcagcctccctgccgctgctggtttattactacgcccagggtgaccactggccatttagcacagtgctctgcaagctggtgcgtttccttttctacactaacctctactgcagcatcctcttcctcacctgcatcagcgtgcaccggtgcctgggggtcctgcgccctctgcactccctgagctggggccatgcccgctatgcccgccgagtggctgcggttgtgtgggtgctagtgctggcctgccaggcacccgtgctctactttgtcaccaccagcgtgagagggacccgaatcacctgccacgacacctcggcccgagagctctttagccattttgtggcttacagctctgtcatgctgggtctgctttttgctgtgcccttttccatcatcctggtctgttacgtgctcatggcccgacggctgctcaaaccggcttatgggaccacaggtctgcctcgggccaagcgcaagtctgtgcgcaccatcgccttagtactggccgtcttcgccctctgcttcctgcctttccacgtcacccgcaccctctattactccttccgatcacttgacctcagttgccacaccctcaacgccatcaacatggcgtataagatcacccggccactggccagcgccaacagttgccttgaccctgtgctctacttcctggcagggcagagactggtccgctttgcccgagatgccaagcccgccacagagcctacacccagcccacaggctcgtcgcaagctggggctgcacaggcctaacagaactgacactgtgaggaaagatttgtcgatcagcagtgatgactcaagaaggacagagtccacaccagctggaagtgagactaaggacattcgtctatagcagctcagtcaggtgtcagttcatgtaggggagagctgtaggggaccaaagcttgttcaaaggggctgatatcctctgatatgatatcaacggctctcatttggcagggactcaggatactcatcctgtggtcccaagagtgacaggaccccaaagtccccaatcatttgtatgtgtgagttggggaatcgtatctaaggcaacgccacctgactcccatgcaaacagctgccattcctgccaaggtacctaggccgagcttcagcctcttaaatccaagggagaagcaggcccagggagaacacagcagagtccagactagctacctggattagaagtagaatcgcggggttggggatttagctcagcggtagagcgccctgggttcagtccccagctccgg

SEQ ID NO: 1004 - DNA, 579 bp, Homo sapiens
atggacgggtccggggagcagctcggaggcggcgggcccaccagctctgaacagttcatgaagacaggggcctttttgttacagggtttcatccaggatcgagcagagaggatggctggggagacacctgagctgaccttggagcagccgccccaggatgcatccaccaagaagctgagcgagtgtctccggcgaattggagatgaactggacaataatatggagctgcagaggatgattgctgacgtggacacggactccccccgagaggtcttcttccgggtggcagctgacatgtttgctgatggcaacttcaactggggccgcgtggttgccctcttctactttgctagcaaactggtgctcaaggccctgtgcactaaagtgcccgagctgatcagaaccatcatgggctggacactggacttcctccgtgagcggctgcttgtctggatccaagaccagggtggctgggaaggcctcctctcctacttcgggacccccacatggcagacagtgaccatctttgtggctggagtcctcaccgcctcgctcaccatctggaagaagatgggctga

SEQ ID NO: 1005 - DNA, 2175 bp, Homo sapiens; identical to SEQ ID NO: 35

SEQ ID NO: 1006 - DNA, 4003 bp, Homo sapiens
agcacattcaccctctgaggcaagtcgccggccttttcagcgttttttgctgttctcccagggttaccagctgaagagccattcctggactccagcttcaacgtcatgggcagcccagaagggcgcttccatttcgccatcgaccgcggtggcaccttcacagatgtctttgcccagtgccctggagggcatgtgcgtgtcctgaagctgctctcagaggaccctgccaactatccagatgcacccacagagggcatccgccgaattctagagcaggaggagggtgtgctgctgcctcgaggccgaccgctagacaccagtcgcattgccagcatccgcatgggtaccacggtggccaccaatgcactgttggaacgacagggagaacgggtggcactgctggtgactcggggtttccgagacctgctgcatattggcactcaggcccgcccggacctctttgacttggctgtgcccatgccagaggttctgtatgaggaagtgctggaggtagatgagcgagtggtgctgtatcgcggagaaccaggtgccggctctcctgtcaaaggccgcacaggggacctgctagagatacagcagcctgtggacctggaagccctgcgtgggaagctggaggggctcttgtctcggggcattcacagtctggcagtggtgctcatgcattcgtacacgtgggcccagcatgagcagcaggtgggcacgctggcccgggagctgggcttcacgcacgtctccttgtcctcggaagtcatgcccatggtacgaattgttcctcggggccatacagcctgtgctgacgcttaccttactcccaccatccagcgctatgtgcagggcttccgccgaggcttccagggccagctaaagaatgtgcaagttctcttcatgcgctctgatggtggcctcgcacccatggatgctttcagtggttcccgggctgtgctctctggccctgctgggggtgtggttggctactcagctaccacctaccatctggaaggcggtcagcctgtcattggctttgacatgggaggcacatccacagacgtgagccgctatgctggagaatttgagcatgtctttgaggctagcacagcaggcgttacccttcaggcaccccagttggacatcaacacagtggcagctggcgggggttcccgcctcttcttcagatctggcctctttgtggttggtccagagtcagcaggtgcccacccaggtcctgcctgctaccgtaaagggggtcctgtgacagtgacagatgctaatctggtcctgggtcgcctgctgcctgcctccttcccctgcatttttgggccaggagaagaccagccactgtctcctgaggcttcccgaaaggctctagaggctgtggccatggaggtcaacagtttcttgaccaatggaccgtgcccagcttcccaactaagtctggaagaggtggccatggggtttgtgcgtgttgccaatgaagccatgtgccggcctatccgtgccctcacacaggcacgaggccatgacccctcagcccatgtattggcttgctttggaggagctggtgggcaacacgcttgtgccattgcccgggccctggggatggatactgtgcacattcacaggcacagcgggctgctgtcagcactaggactggccttggcagatgtggttcacgaagcacaggagccctgttccctgtcttacacacctgaaacctttgcacaactggaccagagactgagccgcctggaggagcagtgtgtggatgccttgcaggtccagggcttccctaggtctcagatcagcaccgagagcttcctgcatcttcgctaccaaggcactgactgcgccctaatggtgtctgcccatcagcatccggccacagcctgctcaccccgagctggtgactttggagccgcatttgtggagaggtacatgagagagtttggcttcattatccccgagcggccggtggtggtagatgatgtacgtgtgaggggaactggccgtagtggacttcagctggaggacacccccaaaatccagactggacctccccacgtggaaaaggtgacccagtgctactttgaagggggttatcaggagactcccgtgtaccttttaggagaactaggctacgggcaccagctccaagggccctgccttatcatcgacaacaacagcaccatccttgtagaaccgggttgccaagcagaggtgactgatacaggggacatccgcatttctgtgggagctgagggtcctagtatggcagataccaggcttgaccccatccagctgtctattttctcacaccgcttcatgagcattgctgagcagatgggccgcatcctacagcgcacagccatctctaccaacatcaaggaacgcctcgacttctcctgtgccctctttgggccagatgggggcctcgtctccaatgctccccacattcctgtgcacctgggtgccatgcaagagactgtacagttccagattcagcacttaggagccgacctccatcctggtgatgtgttgctcagcaaccatcccagcgcagggggcagccatcttcctgacctgactgtcattacaccggtgttttggccaggccagacgaggcctgtgttctacgtggctagccgagggcaccacgcagacattggaggaatcacaccgggctctatgccgcctcactccaccacgctgcaacaggagggtgccgtttttctgtccttcaaactggtccagggaggcgtcttccaggaagaggcagtgacagaggccctacgggcaccaggcaagatctctggctgtagtggaaccaggaacctgcatgacaacctgtcggatcttcgtgcccaggtggcagctaaccagaaaggcatccagctggtgggagagctgatcggacagtatggcttagatgtggtgcaggcctatatgggccatattcaggcgaatgctgagctagcagtgagagacatgctccgggcttttggaacttcccggcaggccaggggcctgcccctggaggtgtctgcagaggatcacatggatgatggctctcccatctgtctgcgtgttcagatcaacctgagtcagggcagtgcggtatttgactttactggttccgggtctgaggtgtttggcaatctcaatgccccgagagccataacactgtctgctctcatctattgcttacgctgtctagtgggccgtgacatcccacttaaccagggttgcctggctcctgtgcgtgtcataattcccaaaggctccatattggatccatccccagaggcagcagtggtcggcggcaacgtgctcacatctcagcgagtagtggatgtcattctgggggcttttggggcctgttcagcctcccagggctgcatgaacaatgtgaccctgggcaatgcccgtatgggctactatgagacagtggctggtggtgccggtgcgggccctggctggcatgggcgcagtggtgtacacagtcacatgaccaacacacgcattacggatccagagattctggagagtcggtatccagttatcctgcgccgctttgagctgaggccaggctccgggggccgaggtcgcttccggggaggtgatggcgtagtccgagagctggtctttcgggaagaggcgctgttgtctgtgctcaccgagcgccgggccttccagccttacggcctccacgggggagagcctggtgcgcgtggcttaaacctcctgatcagaaaagatgggcgcacagtgaatttgggcggcaagacatctgtgaccgtgtaccccggggacgtgttctgcctccacacgcctgggggtgggggctacggagacccggaggatccagcgccaccaccaggctcgcccccgctatttccagccttccccgagcgcggcagtgtattcgagtaccgccgcgcccaggaagccgtatgagtgccccacaataaagatcctttgaatcgca

SEQ ID NO: 1007 - DNA, 1428 bp, Homo sapiens; identical to SEQ ID NO: 139

SEQ ID NO: 1008 - DNA, 1428 bp, Homo sapiens; identical to SEQ ID NO: 139

SEQ ID NO: 1009 - DNA, 370 bp, Homo sapiens
  misc_feature (5)..(5): n is a, c, g, or t
  misc_feature (54)..(54): n is a, c, g, or t
acagntgacaaccttgtgctgaatttgcaggatgaaagtttaattcggggaagngacagcttcattaagggtaagaagtgagtgtggacatcaagaaccccaccaccagagaagttggcacacttttccagtttggaggggccagctagggggtcaagcataccccaccctgacccaagcatcatgtgatggattcttctgtatctgctctcttggattaaggaagactgaagaccaaccctttcagaggggttttcctccttcttgtattggctgggaagggggggggacaggagacagtgtgatttctcagtgatttcctgtagtgttgtccctctccctgaatggggggagataaccaccatgccag

SEQ ID NO: 1010 - DNA, 429 bp, Homo sapiens
gtgaggcgaagctgagcaggaatggccctgtggacctctgtgatgggacatctggtggaatctcacaggcagttctgtggcaaagatggatgaaagctaaggactcatgaggaagctggataactgaacaaagccatgtacaagaatgggaagccagaaaatgggatggtggagtttgaatcaggtggacagttctaaaagtacaaatgatttcgtataaaggtaccacatgtgggtccctttaactgaaggcatggcaagctccacacaaggtccttcatttctgaatttcaagggctcctctgacaagtggacagtgcagtgggtgcaccttttccagaggtgactggatggatgcttgaacagaagatttgccaaatagacattgtgctgtcaagaattttaccattaaaagtgcattattgtagc

SEQ ID NO: 1011 - DNA, 429 bp, Homo sapiens; identical to SEQ ID NO: 1010

SEQ ID NO: 1012 - DNA, 7628 bp, Homo sapiens
cccgctgtacttcaccaggcagtactaggccatagatcccgtgttccgggctcggcgctccgggcttcccagggctgggcccgggacgcggcctcccgccatggcgcagctggagggttattacttctcggccgccttgagctgcaccttcctggtgtcctgcctgctcttctccgccttcagccgcgctctgcgtgagccttacatggacgagatcttccacctgccgcaggcgcagcgctactgcgagggccgcttctcactgtcacagtgggatcctatgattactacattacctggcctgtacctggtgtcggtcggagtggtcaaacctgccagctggatccttggctggtctgagcatgtcgtctgctccatcggaatgctcagatttgtcaatcttctcttcagtgttggcaacttctatttgctgtatttgctcttcaggaagatacagcccagaaacaaggcttcttcaagtatccagagaatcttgtcaacattaaccctagcagtatttccaaccctctatttttttaactttctttactatacagaagccggctctgtattctttactctttttgcttatttgatgtgtctttacggcaaccataggacttcggccttgcttgggttttgtggcttcatgtttcgtcagaccaatatcatctgggctgccttctgtgcaggacacatcattgcacagaagtgcagtgaagcctggaagactgaactacagaagaagaaggaagagaggcttcccccggctaaaggaccgctctcggaactcagaagagttcttcagtttctgctgatgtactccatgtcccttaagaacctgagtatgcttttccttttgacctggccctacatgcttctgctgttggcatttttcgtttttgtggtggttaatggtgggattgtcgtgggtgatcggagtagtcatgaggcctgcctccattttcctcagttgttctacttcttctcctttactgcctttttttcctttcctcacctactttctccgaccaaagtcaagacttttcttagcttagtttggaaacgtagagttcagttctctgtgattactttagtctcggtatttttggtttggaaattcacttacgtccataagtatttactggcagacaataggcattacacgttttatgtgtggaaaagagtatttcagagacatgaaattgtcaagtatttattagttccagcctacatgtttgctggttgggctgtagctgactctttaaaatcaaagtcaattttctggaatttaatgttttttgtatgcttggttgcttctacggttcctcagaaactactagaattccgttacttcattttaccatacattatttataggctcaacatgcctctgccacccatatctagacttgtttgtgaactgggttgctatgcagttgtcaattttctaactttttacatctttctgaacaagacttttcagtggtcggatagtcatgacatccaaaggtttatgtggtagtggcagggctattttgaactctaagagcctatttctacaacagatgactgggtaaaggagtgtggatttcttttaagtaaattcagggagacgaaaagaattacatttgaggctagcctaaaagcttagataatgctaataaatttgcttgcagttgtcttgagaatcttttcagaagtttggggattttccgtgtatgtaggggactgggtgagctccgtagcaccagaacctgtcaaccaacttcctttgtaaagaacagtgaagaatgtgaaaactgtttacaaataaatgacctagtggtatttctgagcaaaattgccagatattgcagtaaatatagctctggtcttagtaacttatgaacgagattctgggatgtctatctaggaattgggtattttaactaagaatatagaagtgatgaagccatttgaactaactccttatttgaaggttttgcaggccgaaggtaagctgtgctgattatgacaccttttatagataatctttctgaaatactgctctgttagttgtccagggctcctgcacaaaactgaccataaaccttgtggcttcagagttttttctcacatacgaataagcagcacctaaactcgagtgctggcagagctcctaaactcgagtgctggcagagctcgctccttcaggagacaagagttcattgttcctgttcagctcactccttagaggggccttacttttagacaggtccctccagtctgtctgtgtctgcacaggactgtctccaccggcttcttgtgcagttaatgccattggctttagggatcctctgattcagggtaacggtacctggagaccctggattatatctatcacatttttaaagtaagttccctttcagaggtcccacatcattttggtgtgtgtgtgtgtgtgtgtgtgtgtgtgtgtgtgtgtgtgtgtgtgtgtgtgtaagtaagatgaccttgatgagagcttttaagtaaaagttagtttttaaaagagaggccaaaaaacaacaacaacaaaacccagatggccaaggtcatgtaatttacatttgtccctattatccaaacaaaccagaactcagaaggtgagaggtcattggtttagtttcattttataatttaggaagcactactaggctctggggtttgctttgtctgggttccggttctgtgctgctgtttaaagtttgtttattgattgtcaccattgttacagacactgttgcttagtcctgtgctgagagtgtaaacacggaagtgtgacttgggcttacttagcccacttcctgagctttacacacacacacacacacacacacacacacacacacactcactccccaaaggaacagaaccttttattttattggataatgttttctttgagttttaaatatgtagtaaactttatacaactttaaaaactacttggataaaagttacaagcatagccctgggtggtcagcccgcacagaccactctgatgcttcggaggtttgctcaagtgtaacagtgactggtgtgttagcacatcagaaagcttcatgacactttattatgatagaagctaagtccaggaagcaaacacttgcaattgaataaagcaagtgctgtctgatgcttagtccctggcttttgtgtctgggaacacagagggatggagtgcttcatcccagtagtctgctgtaaggagggaagcactttgtcccatgtaatggaaggaggctgctttcagatatgttgagtcccttcagaattaggagacatcgtaggggtctacagagagagagagagagagagagagagaaagagagagagagagagagagagagagagagagaaaataagtactggtattctacaccacttcccattatgtattggaagtaggacttggcatttcagactgcagtgccatggactaaaaggtgctatttagttgttactgtgatcttaaaaatggatgcatgttgatacatttgaggtaggggtttggttaatgttgcttgggcagttgacaagttaatggtcatttgctgataaatttctcagtcttttaactcagtatgtgagagaaaaaggcttcacccggcggttcacttttggttgttcaaattaacagccccatctctgaagtcatttcacttgggaaaaaaatccttgcttttgcaaatgtagattgtatttctactttaatttttaaaaagaattatcaagtagttttcattagacttaattgatttattgatcataagaggctcagtggttaaaagcttgagcccccattgcagggacccccgtgtggttccttgcccctagggcagcctctagggcactgactgcaggcttccagctctgcagcctcctgaactcatctgctgtaaacacactgcccaccgcctacttcagttaaaaactctaaatggtcagtgtagaaaatgtcagctgctgaaggggtgtggagtgcgagttctccatcactcttccagtggacattttagagcctttatgaagaggcccaggcttgcctgagctgctctaggctcagtggtcagttttagcagctctgctttctgtgacaatccacaggcatagactcacttcccagacacattagaacgagtgtgtgcactgtacctgcttatatttacacttccttggacagccttcccacggctgcgtctcaccaaaccttgtggacatagtgtgttgtactttacacatagtacataatcttgtacgaggaatttctgtgctcatggaccatctgtgtttgtcgttgtaaaacacccactgtaaacagtgtgatttacttacagggaatagcttaggatatccgtgatgtatttctggtgtgaacttacctgacttggacattgtgctcatctcctttgtctggagaggagagaagggagtcccagctttcatttataactcctagagagtagacatatattttaggtcaagttcaaactgtattcaggtaaaatcatatcttagagcagttagaaagcctttaaatgttaagacaagtgtaattttaatgtatacaatattttgcatagatgaacttaagatgtagaaaagaatgcccttgattttggttccacataaaaaagacagattgttgaaagacaggtgcttgttcctgatctcagatgagaatgttatgtttgaactcttgttagtacctggggtgagtcctaccgcatttcaacaggattcatgctgtagtacatatctgtatgctcataaacatgctgtttgatgtatatcgagtaaatttgtattgaatggagttttcaatatagaaggaagcagatattctagaaaagtatcatataaccaacttaatcttaggaagcaaatgtgttttatactaagccatcctgacccatcctctgcctgttttctgaatgttattttctatagtaatgaatttagtcatgcccgtttagtatgcgccgtgtgcaataggcttgattctaacaatgccatttaaatatgaagtcattcagtaattacagtaagtttgatgacttgtcttttacatttcaatcagttagaaacatcttctgtttggttttagctctctgatttacttttctttgggtgcattttaggtatttgaagtcaatggcaaaatgttgctgagaaatataaacaacttagttaatgatgacataattttaatatatcgaaatgattccagcactaaattccataatgtttggaagttatttctaaagtaaatttggtgataataggtatctaataatctctttttattatttaaaatgagatattgattagtggcattctccataccttagacactgttaaagcaaaagtaggtagggtatatttttctttcaaaaaagtaaatatatggaatttgcattcagaaatttgatcagttcaatttatttgagccctgtactttcactgtcttgctcaagatgaataagaatgaaaagaattacagtagttgtctttctcaatagtgttttgctggttcacacacacacacgcactcacactcacactcacacacatcataaagctgaccttttgctattttgtttcgctatcaaagctgtactggtctgacctctcatgttattgtgtgagttacaggtttttaaaatccttaggagccttttagaggaacatgtataaaatgataaacgcttaggttttattacaagatgagttgttgaacaaattgttgatgtttaattggaaaaacatagctcccataacaacaagttcttacggttatttgaaagcataatacattgctttaaatgtagatcagtggtcaacaaataggttttaactcacaaaaacaccctttcttaattatgttgtctctttaggggcatagagctcccctaaataagttttgtatttactgaaaacatttcactgggaaagcgtcagtggcttgagagagtagatatgggatagtgtcttttcaagggtctcaaaacctgccattttaaacgtgagtttattgtagttcatgttctttatattcttcggtaagtcaggttcaagaatctcttgaagtattctgcctttcatatattttgtttctgaaataaagtggatgtttagctttcgttaagctggtttttaaattgtgtcatacacccagccacaggtggtgtaaagtctcagcgcaccagtaatgcagtgtttacccacatacgtttgtgttcctttgtcaggagagaagtgtatttgggtttcccctgtagtgaggaataggaaagtactgtgtaatcaaatttgtactgaaatgtttactaggtgatgacagtgggctacattttaacgtattcttgtaatttaactttttctactagtctggattaaactttttatagttttgtattgttttgaaccacaaagatttagaattctccaccttcattaatgattatttgttgttcaggaagggtctcataatccaggctagcctggaatttacaatgtagccaagaaagaccttgaactcctgattcttttgcctctacctctggactgctgggttcccggcatgccgcaccatgcccagtgtatgcagtgctggggagcaaacacagaacttagggcagccggcaagcagtctgccagctgggctgtttcctccagccctgctgcttctactgtggccgaaaatgttccctgggttccatgaagtggaaggtaaatgtgaaaccaaaagtcatttgttccatgattaaattgtgtctcagatgacggaacctaatgcacccggccatgaaactgtttacctcacagactgggggatgtttctgatagtgataataggtttggaaacaacctgaactgtctacttctgtctcgctggttctcaggcctcttgtgttaactgtaccacatacacggagagactgaggagagggtgggtttttgtctcatattagaataagcagaatgagtatttgtctaatgttacaaagtagctgtgtgagctgcctttatgagtgggcagcctgacgagaatcgggctcttagctgcagctgagatggagtagtaggaaggacactgagtctaccttcctttttgtaacattttggaaaacaaattccatgggaaatagaactccactacttttctagatcagacagttgaggcgcatacagactgtctcttccagagcaggcagtctctcccattgtgtcatcacggcctcagcttgttgtgtgaacacaaaatctacagcacgggctgaagttgtcagcccgattaacaaggaagtaaagatctttgatatccaatagagatgtagttgcctaagaattaatttctcaaaagaactttggaaataaatggttgttttaaactgatctgtgatttttaaataatcttttctgaaagaatttgatgtttattttaaatacgtgaatatatgttttaaccgttttttaaggttttacattttgttacattcaaaacttaagatgtttgactctaaaattgtgattcatgtcatttaaactcttgaataaacctatttataagaataaaagcgttttaaatagttaaaaaaaaa

SEQ ID NO: 1013 - DNA, 2399 bp, Homo sapiens
cgggtcatccgcctggttctgcaatgggcagccatgtatggtgatcttctccaagaagacgacgtggccatggctttcctggaggagttctatgtgtctgtatcagatgatgcacggatgatggtcgccttcaaggagcagctggctgagctggagaagactgtcaaacagatctcagaagacgcaaaagctccacagaagaagcacaaggtgcttttgcagcagtttaatacaggtgacgagagggcccagaagcgtcagccgattcgtggctctgatgaagttttgttcaaggtctactgcattgaccacaccgataccaccatccgagtgcctgtagccgcctcggtgaaagaagtcatcagtgcagtagcagacaaacttggctctggggaaggcctgatcattgtcaagatgaactctggaggagaaaaggtggtgctcaaacctaatgatgtttcagtatttacgacgctcaccattaatggacgcctgtttgcctgcccgcgagagcaattcgactcactgactcccttgccagaacaggagggcccgaccactgggacagtggggacgtttgaactgatgagctcgaaagacttggcgtaccagatgacaacgtatgactgggaactcttcaactgtgtgctcgagctggagctaatctaccacacatttggaaggcataattttaaaaagaccacagcaaacttggatttgttcctgaggagatttaatgaaattcagttttgggttgtcactgagatctgcctttgttcccagctcagcaagcgtgttcagcttttgaaaaaatgtatcaagatagcggctcactgcaaggagtacaaaaacttgaattccttcttcggcatcgtcatggggctcagtaacgtggctgagagccgcctggcattaacatgggagaaactgccgagcaagtttaagaagttctatgcggagtttgagagcttaatggatccttccagaaatcacaaggcgtacaggctgacagcagctaaactggagccccccctcatccctttcatgcccttgcttattaaagatatgacatttactcatgaggggaacaagacattcattgacaatctagtaaactttgaaaaaatgcgcatgattgcaaatactgccagaacggtgcgctactacaggagccagccattcaatccggatgctgctcaagctaataagaaccatcaggatgtccggagttatgtacggcaattaaatgtgattgacaaccagagaactttatcacagatgtcacacagattagagcctcgcaggccatagacatctgcagtgcccagagtgatgctccgtctccagtccacaatctttcaaaagatgctgtgtatgctactactgactgtgttgctactagagaattccccagaatgagcaagagacacctcctgagagcccctcggggccacatcctgctttccgaccacacaggagaaggatctgtcttgtctaacgcggacatgccgtagcttaggaaccatcagctgtagtcatcttcttcacggttggcacaccaccgcaggctcacgtgaaggcataacctggcgaggctacaccaggcccctgacatcccttcccaggctgttgcagcatgagactgtcccgtggataggtttgacttggaatcgctgcaatgatataattgaatgatttgtttacttagcaccttatttggggtctgggttctggggagggtgttgaccataaaagtccaaattatccatcatgttcctccatcgtcataatcttacctctgaaggaatggaacctcatcacaacactatgaaacattatgactgttcagtctgtaatttcggaatgatctatagaataatatgtttacattgtaacttttaaaaacttacaaatcaggattacacacatgagaattccactaagaaacaccaaggttcttaatatcgccagcgttaagatagaaagtaacatttcagaagagcacaatatacacaaaacattttttcaaattgaaatattttcctgggcattaaaaaacctttccactacaaatttattgttactgatgaaaaaaaaagcatattttctggacttaaatgttattacaaaaatcttaattttcagcaattgttttgcactttcagatagattgtaaataggttatgcagtcaatggtatagaattatttatttgctacataatagacattgtgccaaataattcctttttatttattttattcagtatgaaattttggagtacattttttctgttttcttaattagactacatttaatgtataggaattgtatgtacatatctcttctgtaaataacagccagtatcttcattaaatatacttgacaagaaaaaaaaaa

SEQ ID NO: 1014 - DNA, 8329 bp, Homo sapiens; identical to SEQ ID NO: 357

SEQ ID NO: 1015 - DNA, 3622 bp, Homo sapiens
gctgctctgactttcttttagtctcagcatggagaggaccgtcttctaaagcttcttcataaaaacagcagtaagattatttaaagaatagatatctggaaacaatcagaagaacaacatgggaaaatctgagaaaagggttgcaacccatggggtcagatgttttgccaagatcaagatgtttctgttggcattaacatgtgcatatgtatccaaatcattatcaggaacttatatgaattccatgctcacacaaatagagagacaattcggtatccccacatctatagttgggcttatcaatgggagctttgaaataggaaaccttttgttgattatatttgtgagttattttggaacaaaacttcacagacctatcatgattggtgttggatgtgcagttatgggcctggggtgtttcttaatctcgctaccccatttcctcatgggccaatatgaatatgaaacgattttacctacaagcaacgtgtcctcaaacagcttcttctgtgtggaaaacagatcccagaccttaaatccaacacaagacccctcagagtgtgtgaaagaaatgaaatcattaatgtggatatatgtactggtaggaaacataatacgtggaattggtgaaactcccatcatgcccttgggtatttcctacattgaagactttgccaaatctgaaaactctcctttatacattgggattttagaaacaggaatgaccattggccctttgattggacttctgttggcttcttcctgtgcaaacatttatgtagacattgagtctgtgaatacagatgacctgaccataactcccacagatacacgctgggtcggagcttggtggatcggctttttggtctgtgcaggagtgaatatcctgaccagctttccctttttcttttttcccaaaacacttccaaaggaaggattacaggagaatgtggatggaactgaaaatgccaaagagaagaaacacagaaaaaaggccaaggaagaaaaacgaggaatcactaaagatttctttgtgttcatgaagagcctctcctgcaatccaatttacatgcttttcatccttataagtgttctccagttcaatgcatttatcaattcatttaccttcatgcctaagtatctggaacagcaatatggaaaatccactgctgaggtagtcttccttatgggtctttatatgttacctccaatatgcctcggatatttaattggtggtttgattatgaagaagttcaaggttactgtcaagaaagctgcacacttagcattctggctctgcctgtctgagtaccttctgtctttccttagctatgtgatgacctgtgataattttccagtggcaggcttaacaacctcttatgaaggggttcagcaccaactatatgtggagaacaaggtccttgctgactgtaacacaaggtgtaactgctcaacgaacacatgggatccagtgtgtggagacaatggcctggcatacatgtcagcctgccttgcaggctgtgagaagtctgttggaacaggaaccaacatggtgtttcagaattgcagctgcattcagtcatcgggaaactcatctgcagtcctgggcctgtgtaacaaaggccctgactgtgccaacaagctgcagtacttcttaatcatagcaatatttggctgtttcatatactcgctggcaggcattccagggtatatggttcttctgaggtgtatcaagtctgaagagaagtcacttggagttgggttacatgcattttgcataagaatattagctggcattcctgcacccatttactttggagctttgatagacagaacctgtttacattggggaaccctgaaatgtggtgagcccggggcatgcaggatgtatgacataaacagcttcagacgtctttaccttggattgccggctgcactaagaggagcaagctttgtccccgccttcttcattctaagacttacgaggacattccagttccctggggacattgagtcttcaaaaactgatcatgcggagatgaagctcaccttgaaggaaagtgagtgcacagaagtcctaaggtcgaaagtgacggaggactgaaaacgaagctgtaatgagttttctactgccctatgcaaggccatgaagagaatgtacacttcactagttttgaatcatgagagatacaattggaactcttaggttatccataaggccgtcaaagttacttcattcatgataaaattatttactgatagcattttcagaaggctgacatagtactcaagattttcccagggaaaacttctatagtggccttcacccttaaccttaaagctgccttcattttcaaccagcatgttctcttttaactcaatcaagggaagtggatgtttcccacacattctcaaatatctttgaaactttcctattgcagaaatatcatttagatgtttttaatttatatactgatgctggagatcaaaatatacatcttggttaagccagattgcgttagtttgttttgatttatcctctgcatgtgcaaaacttctgcatctgtcttgtgtacttaggagtggtaactctcttttacttctaagattagactcttcagagtgtgccatctcctgttttcagtcccttctatcattacttctgtcacacagttgatcatttcacatacatcactgaaaactttaatcaggttgttaaccagtcatgtagcaaagatgattgggactctttttctctaacaattcaaagctggtcatgaaactcttttttaaaaatcaagagtaggggaaaactagtcctttcaaaggctccttgtagagatgggctgtatctcagtggaatagttattacctaatgtatgtgaggccccaggttcaaccacaacgtagggtaaaccaataaagtaataaaaataacgtaagtccagatgcatcatcagatattctaaaaggctattctcatattcagggggcttcaatggcttagtgttcattctattcaagggccatggagcacatagttattaacattcataataaacttagagtaaaacctttaaagagggaccagatagaaagttcgatagaaagaactgtttgccaccgaacctgaaaaggttgttgtgatccttgggaccaacgtgaaggagagaacaaactctcacaagttgtgctatatctctttttaattgtgcatgccccattgcaaatcaattaataaaaaaagcattaaaaggtttaagaccgacatttgctgtaaaattatagctcataaacgtgaaagtacacatcaaaaataaaatcaagttgtggttgttttaatgagaaatatccctcctaggcataggcatttggatatttggtttctaatgaatgactctgcttagggaagattggatgtgcatccctaagacaaaaggtgaatcactgagatgggttgaaagttaaaagcctcacctacttccagtacactctctgctttgtgctttggttgatgatatgaaatcatggtttcctgctccagccaccatgcctggtgcttgccttcatgaacttccatccctggagtcatgcgttaaaataaactcctttttttaatgtg

SEQ ID NO: 1016 - DNA, 1322 bp, Homo sapiens; identical to SEQ ID NO: 25

SEQ ID NO: 1017 - DNA, 1322 bp, Homo sapiens; identical to SEQ ID NO: 25

SEQ ID NO: 1018 - DNA, 2954 bp, Homo sapiens; identical to SEQ ID NO: 74

SEQ ID NO: 1019 - DNA, 4100 bp, Homo sapiens
  misc_feature (3859)..(3859): n is a, c, g, or t
acctcttcctcaactcacttctctctactctcacttttttttttcttcttcttttttttttttttttttttttttttttttgcaaaagaagggggtaaaaaaatgctgcactgtcgggcgaggccggtgagtgagcgagccggagccaatcagcgcccgccgttccgaaattgccttttatggctcgagtggccgctgtggcgtcctataaaacccggcggcgcaacgcgcgccactgtcgagtccgcgtccacccgcgagtacaacctccttgcagctcctccgtcccggtccacacccgccaccaggtaagcagggacgtcgggcccagcgggccccaactttaccttggccactacctcgctgcaggatcgtgaggaacactcagaagggacaccgtagaggggtggagcgtggtaccgggccgcggagcagctggcaaagcttaactttcccggcccctagggtgtagagtgtttgcagtcgtattcccgcggtgtggacactcgtgggtacgctcctgcttggtgcgcggggcttggggacacactagagtcgcggtgtgggcatttggagagccggtgcggctgcgggtgttaagccgcatctgtccaccttgaggggcaacagtattggggtcaggcgttacaatcacgctttgatggcctatgggtctttgtccaaaccggttttgccattcggcttggcgggcgcggcggggccgctcggccgggtgggggctgggatgccattgcgcgtgcgcgctctatcactgggcattggggccgtgcgcgctggggagggaactcttcctctccccctcttccgagttaagagttgcgcgtgcgtattgagactaggagcgcggccgccccgggttgggcgagggcgggccgtccaccggaaggggcggggtcgtagcggctaggcgcctgctcgcgcttcctgctgggtgtggtcgcctcccgcgcgcgcactagccgcccgtcgcctcagtgtaggcgggcctgtgcccgtttggggaggggcggaggcctggcttcctgccgtgggtccgcctccgggccagcgtttgccttttatggtaataatgcggctgtcctgcgcttcctttgtcccctgagcttgggcgcgcccctggcggctcgaggccgcggctcgccggaagtgggcagggcggcagcggctgctcttggcggctccgcggtgaccatagccctcttttgtgccttgatagttcgccatggatgacgatatcgctgcgctcgtcgtcgacaacggctccggcatgtgcaaggccggcttcgcgggcgacgatgctccccgggccgtcttcccctccatcgtgggccgccctaggcaccaggtaagtgaccctttactttgggagtggcagccctagggttttcttgggggtcgatgccagtgctgagaacgttgttctcctccgcagggtgtgatggtgggtatgggtcagaaggactcctacgtgggcgacgaggcccagagcaagagaggcatcctgaccctgaagtaccccattgaacacggcattgtaaccaactgggacgatatggagaagatttggcaccacactttctacaatgagctgcgtgtggcccctgaggagcaccctgtgctgctcaccgaggcccctctgaaccctaaggccaaccgtgaaaagatgacccaggtcagtatcctgggtgaccctccccttcttattgggtcaacttctcagcacgcccttctctaattgtctttcttctgccatgtcccataggactctcttctatgagctgagtctcccttggaactttgcagtttctgctctttcccagatgaggtcttttttttctctcgatcgcctttctgactaggtgttttaaacccctacagtgctgtgggtgtaggtactaacaatggctcgtgtgacaaagctaatgaggctggtgataaatggccttggagtgtgtattcagtagatgacagtaggtctaaatggagcccctgtcctgatactcccagcacacttaacttagctgtgttcttgccctctttgcatgtctcactcaaatctatccttacagtctcacctgccctgagtgtttcttgtggctttaggagcttgacaatactgtattcctttctctacagatcatgtttgagaccttcaacaccccagccatgtacgtagccatccaggctgtgttgtccctgtatgcctctggtcgtaccactggcattgtgatggactccggagacggggtcacccacactgtgcccatctatgagggttacgcgctccctcatgccatcctgcgtctggacctggctggccgggacctgacagactacctcatgaagatcctgaccgagcgtggctacagcttcaccaccacagctgagagggaaatcgtgcgtgacattaaagagaagctgtgctatgttgccctagacttcgagcaagagatggccactgccgcatcctcttcctccctggagaagagctatgagctgcctgacggtcaggtcatcactatcggcaatgagcggttccgatgccccgaggctctcttccagccttccttcctgggtaagttgtagtctcgtcccttctccatctaaaggtgaccaatgctggaggccacactgtaactctgatctcttgcttttcctttcaggtatggaatcctgtggcatccatgaaactacattcaattccatcatgaagtgtgacgttgacatccgtaaagacctctatgccaacacagtgctgtctggtggcaccaccatgtacccaggcatcgctgacaggatgcagaaggagattactgccctggctcctagcaccatgaagatcaaggtaagcagccttagcctggacccatagtggggtgtggtcagccctgtagttgtagccaactctcttggcttaaggaacaacccagcatccagaatgctcacaatcactgtcttgctttcttcagatcattgctcctcctgagcgcaagtactctgtgtggattggtggctctatcctggcctcactgtccaccttccagcagatgtggatcagcaagcaggagtacgatgagtccggcccctccatcgtgcaccgcaaatgcttctaggcggactgttactgagctgcgttttacaccctttctttgacaaaacctaacttgcgcagaaaaaaaaaatgagacatttggcatggctttattgtttttttgttttttgtttttgttttttttaaattttttttttaaaaaggttttttttttttgttttgttttggcgcttttgactcaaggatttaaaaactggaacggtgaaggcgaccgcagttggttggagcaaacatcccccaaagttctacaatgtggctgaggactttgattgtacattgttttttgtttttggtttttttaatagtcactccaagtatccacggcatagatggttacaggaagtccctcaccctcccaaaagccacccccaactcctaaggggaggatggctgcatccatgccctgagtccacaccgggaaggtgacagcattgcttctgtgtaaattatgtacttgcaaacatttttttaaatcttccgccttaatacttcatttttgtttttaatttctgaatggtcagccattcgtggcctgccccttttttttgtccccccaacttgatgtatgaaggctttggtctccctgggagtggtttgaggtgttgaggcgccagggctggcctgtacactgacgtgagaccgttttaataaaagtgcacaccttacaaacaagtttgtggctctgtggcttctactgggtgtggggagcaggctgggtgggtgtgnaactccacgtgggggaggggcaatttagggtgggctggccttgcctgatagctagtgggagggctaaaggatcatgatctttaatgaggtctcataaataccccaccttcggtcttgagggagggtgaggagttgggaaggtatctccctgacacctggccaagctggcctcatcaaccctactttcctcagccagggggaggtccacatcctcccacctgcatagcttgcgtctagaggc

SEQ ID NO: 1020 - DNA, 4100 bp, Homo sapiens; identical to SEQ ID NO: 1019
  misc_feature (3859)..(3859): n is a, c, g, or t

SEQ ID NO: 1021 - DNA, 2039 bp, Homo sapiens; identical to SEQ ID NO: 400

SEQ ID NO: 1022 - DNA, 2039 bp, Homo sapiens; identical to SEQ ID NO: 400

SEQ ID NO: 1023 - DNA, 2039 bp, Homo sapiens; identical to SEQ ID NO: 400

SEQ ID NO: 1024 - DNA, 1547 bp, Homo sapiens; identical to SEQ ID NO: 105

SEQ ID NO: 1025 - DNA, 1547 bp, Homo sapiens; identical to SEQ ID NO: 105

SEQ ID NO: 1026 - DNA, 1725 bp, Homo sapiens
agtgctgctccggtaccgagtcgcgctcacgtttgtccttaagactcccttcggtgtctccaggaccctctttccttcctccgcagcgatcctactgccagaacttcaccatgtccattctcaagatccatgccagagagatctttgactcccgcgggaatcccaccgttgaggtggatctctacaccgcaaaaggtctcttccgtgctgcggtgcccagcggtgcgtccactggcatctacgaggccctagaactccgagacaatgataagacccgcttcatggggaagggtgtctcaaaggctgttgagcacatcaataaaactattgcacctgctctggttagcaagaaactgaatgttgtggagcaggagaagattgaccagctgatgatcgagatggacggcacagagaataaatctaagtttggtgcaaatgccatcctgggagtgtccctggctgtctgcaaggctggtgccgtggggaagggggtgcccctttaccgtcacattgccgacttggccggcaaccctgaagtcactctgccggtcccagctttcaatgtgatcaacggcggttctcatgctggcaacaagttggccatgcaagagttcatgatcctgcctgtgggggcatcctctttccgggaagccatgcgcattggagcagaggtttaccacaacctgaagaacgtcatcaaagagaagtacgggaaagacgccaccaatgtgggtgatgagggtggattcgcacctaacatcctggagaacaaagaagcactggagctgctcaagtctgccattgcaaaggccggctacactgaccaggttgtcatcggcatggatgtggctgcctccgagttctacagggctggcaagtatgacctggacttcaagtctccagatgatgccagccggtacatcacacccgaccagctggccgacctgtacaagtccttcatcaaggactacccagtggtgtccattgaagatccctttgaccaggacgactgggatgcttggcagaagttcacagctactgcaggcatccaggtggtgggggatgacctcacagtgaccaaccctaagcggatcgccaaggctgcaggcgaaaagtcctgcaactgcctcctgctcaaagtgaaccagattggctctgtgaccgagtctctgcaggcgtgtaagctggcccagtccaatggctggggtgtcatggtgtcccatcgatctgaggagactgaggacactttcattgccgacctggtggtggggctctgcactgggcagatcaagactggtgccccctgccgatctgagcgcctggccaagtacaatcagatccttagaatcgaggaggaactgggcagcaaagccaagtttgccggcaggtccttcaggaaccccctggccaagtaaggcatggaccggagatccctggagctaccagatcctctgtctccgtcatccaggcggctcaaggctggcccagtgcttgcccctcccatgtcactgcttccttagatgtccaccccgaccacctggagccctgctggagcccccagctttgtaatcatgtgatcagtctgaatcattgtttctgtcacctgactttccagctagtgtctggagccctctgaactccagcgtaatctctagagtgcccacaccatcaagactccccccagtggtttacttgcaaaaataaaagctgcagaagctcaaaaaa

SEQ ID NO: 1027 - DNA, 1725 bp, Homo sapiens; identical to SEQ ID NO: 1026

SEQ ID NO: 1028 - DNA, 2460 bp, Homo sapiens
ccccggcgccaacctagctgccccgcccgctgccgacgtccgacatgctgagccgtgctttgctgtgcctggccctggcctgggcggctagggtgggcgccgacgctctggaggaggaggacaacgtcctggtgctgaagaagagcaacttcgcagagccggcggcgcacaactacctgctggtggagttctatgccccatggtgtggccactgcaaagcactggccccagagtatgccaaagctgctgcaaaactgaaggcagaaggctctgagatccgactagcaaaggtggacgccacagaagagtctgacctggcccagcagtatggtgtccgtggctaccccacaatcaagttcttcaagaatggagacacagcctccccaaaggaatatacagctggcagggaagctgacgacattgtgaactggctgaagaaacgcacaggcccagcagccacaaccctgtctgacactgcagctgcagagtccttggtggactcaagcgaagtgacggtcatcggcttcttcaaggacgcagggtcagactccgccaagcagttcttgctggcagcagaggctgttgatgacataccttttggaatcacttccaatagcgatgtgttttccaagtaccagctggacaaggatggggtggtcctctttaagaagtttgatgaaggccgcaacaattttgaaggtgagatcaccaaggagaagctattagacttcatcaagcacaaccagctgcctttggtcatcgagttcactgaacagacagctccaaagattttcggaggtgaaatcaagacacatattctgctgttcctgcccaagagtgtgtctgactacgatggcaaattgagcaactttaagaaagcggccgagggctttaagggcaagatcctgttcatcttcatcgatagtgaccacactgacaaccagcgcatacttgagttctttggcctgaagaaggaggaatgtccagctgtgcggcttattaccctggaggaagagatgaccaagtacaaaccggagtcagacgagctgacagctgagaagatcacacaattttgccaccacttcctggagggcaagatcaagccccacctgatgagccaggaactgcctgaagactgggacaagcagccagtgaaagtgctagttgggaaaaactttgaggaggttgcttttgatgagaaaaagaacgtgtttgttgaattctatgctccctggtgtggtcactgcaagcagctagccccgatttgggataaactgggagagacatacaaagaccatgagaatatcgtcatcgctaagatggactcaacagccaatgaggtggaagctgtgaaggtgcacagctttcccacactcaagttcttcccagcaagtgcagacagaacggtcattgattacaacggtgagcggacactagatggttttaagaaattcttggagagcggtggccaggatggagcgggggacaatgacgacctcgacctagaagaagctttagagccagatatggaagaagacgacgatcagaaagccgtgaaggatgaactgtagtgcagaagccagatctgggcgcctgaacccaaaacctcggtgggccatgtcccagcagcccacatctccggagcctgagcctcaccccaggagggagcgccatcagaacccagggaatctttctgaagccacactcatctgacacacgtacacttaaacctgtctcttctttttttgcttttcaattttggaaagggatctctgtccaggccagcccatcttgaagggctacgttttgttttaattggtggtgtacttttttgtacgtggattttgtcccaagtgcttgctaccatatttggggatttcacactggtaatgtctttcctgttagagaggtttatgctatcacttcagatttcgtctgtgagatgtttcatcttcctgacatgtctccatgtcgaggtacttgttccaccacgcagacctccctgagaccccttcctgccctgcgcaggaggcgatggttctgggtcgtatgctctctctctctccaccttgtactagtgttgccatgacagcatggcttttgtagtttgcatttaacctggggatttctgcatcctgtcagagggtgggtccccacgtgtggaaaagagacagtggtggcttgctgccaggctcaggccaggcctggacagctctcactcttcttaagccagaactaccgaccagccggccggctgtgggcacattactctggctgctggatcctcttccagcatggcatgtggcctgtgtgaggcagaaccgggacccttgattcccagactgggagtcagctaaggacactggggctgaatgaaatgcccattctcaaggtctatttctaaaccataatgttggaattgaacacattggctaaataaagttgaaattttactaccat

SEQ ID NO: 1029 - DNA, 2460 bp, Homo sapiens; identical to SEQ ID NO: 1028

SEQ ID NO: 1030 - DNA, 413 bp, Homo sapiens
atgaagctgcttgcaatggttgcactgctggtcaccatctgtagcctagaaggagctttggttcggagacaggcagcggagacggatgtgcagaccctgttcagccagtatcttcagagtttaactgactatggcaaggatttgatggagaaggcccagccctcagagattcagaaccaagccaaggcttactttcagaatgcacaggagagactgacaccctttgtccagagaactgggacgaatctgatggacttcttaagccgtttaatgagccccgaggagaaaccagctcctgccgctaagtgaggtgtgtcaggactcgtcttcctaccccagctgacccactggccatcgctggagtccctctcccgactttctgcttgtcttttccaataaattcggaaggagtt

SEQ ID NO: 1031 - DNA, 1139 bp, Homo sapiens; identical to SEQ ID NO: 284

SEQ ID NO: 1032 - DNA, 8329 bp, Homo sapiens; identical to SEQ ID NO: 357

SEQ ID NO: 1033 - DNA, 1346 bp, Homo sapiens; identical to SEQ ID NO: 273

SEQ ID NO: 1034 - DNA, 1346 bp, Homo sapiens; identical to SEQ ID NO: 273

SEQ ID NO: 1035 - DNA, 1384 bp, Homo sapiens
catgtagaccctagccatcttgcctagatcagccccctcctccttctcgcctgctgtcctgctgtcccaggtttaacccctctttctccttggactcaggctgcctccggaagccagagtcagctctctatacatttaacagtcccagatctgtctccagcctgagggcccatcatggagaaggactttcaagatatccagcagctggactctgaggaaaacgaccatcagctcattggcgatgaggaacaaggctctcatgtgcagaatcttaggacagaaaatccacgttggggaggacagcctccttccaggccctttccacagcgcctctgctctaagttccgcctcagtctgctcgccctggccttcaacattctcctgctggtggtcatctgtgtggtttcatcccaaagcatgcagctgcaaaaggagttctggaccctgaaagaaaccttgagcaacttctccaccaccaccctgatggagttcaaggctctggactcccacggaggtagcaggaatgacaacttgacttcttgggaaaccatactggagaaaaagcagaaggacataaaagcagatcactccacgctgctcttccacctgaagcacttccccctggatctgcgaaccctgacctgtcagctggcgttcttcctgagcaacggcacagaatgctgccccgttaactgggtggagtttggtggaagctgctactggttttctcgggatgggctcacctgggctgaggctgaccagtactgccaaatggagaatgcccatctgctggtcatcaactccagggaggagcaggaattcgttgtaaagcacaggggcgcgtttcacatttggataggtctcaccgacaaggatggctcctggaaatgggtggatgggacggaatatagaagtaacttcaagaattgggctttcactcagccagataactggcagggccatgaagaggggggaagtgaagactgtgctgaaatcctgtcagatggcctctggaatgacaacttctgccagcaggtgaaccgctgggcttgtgaaaggaaacgggacatcacctactaggagtctgctctactatgtctttgccaaccctccccccaacccccgcatcactcattaggagtctgctctaccatgtctctgccccaccccatcaccgcatcaccccaacattttcactggggatattggagcaagaaagagagacagagtcccaggcatgaggggggttatgggagaatggaaagggggtggctctatggtctcatacgttaggaagactgagattccacccctcttcacaacttattacaattgttataaatttcaacaatggagtaggaaagaaaaaaataaacaataccag

SEQ ID NO: 1036 - DNA, 2442 bp, Homo sapiens; identical to SEQ ID NO: 341

SEQ ID NO: 1037 - DNA, 1694 bp, Homo sapiens
ggggcccccaggccctgtgcttataaccctggatgcgcgcctctcccggtcctgctccgctgttcgccactgccgcctgggctcactgagtggttcacccggccaggaagacagactacggactccagggacctgtagctacaatccaagacaagatgtccagcaagggctctgtggttctggcctacagtggtggtctggacacctcctgcatcctcgtgtggctgaaggaacaaggctatgatgtcatcgcctacctggccaacattggccagaaggaagactttgaggaagccaggaagaaggcactgaagcttggggccaaaaaggtgttcattgaggatgtaagcaaggagtttgtggaagagttcatctggcctgctgtccagtccagtgcactctatgaggaccgctatctcctaggcacctctctcgccaggccttgcatagctcgcaaacaagtggaaattgcccagcgcgaaggggccaagtatgtgtctcacggcgccacggggaagggcaatgaccaggtccgctttgagctcacctgctactcgttagcaccccagattaaggtcatcgccccctggaggatgcccgagttttacaaccggttcaagggccgaaatgatttgatggaatacgcaaagcaacatggaatccccatccctgtcacccccaagagcccctggagcatggatgagaaccttatgcacatcagctacgaggctggaatcctggaaaaccccaagaaccaagcacctccaggtctctacacaaaaactcaggaccctgccaaagcacccaacaccccagatgtccttgagatagaattcaaaaaaggggtccctgtgaaggtgaccaacgtcaaagatggcactacccacagcacatccttggacctcttcatgtacctgaatgaagttgcgggcaagcatggagtagggcgcattgacatcgtggagaaccgcttcattggaatgaagtcccggggtatctacgagaccccagcagggaccatcctttaccacgctcatttagacatagaggccttcaccatggatcgggaagtacgcaaaatcaagcagggcctgggcctcaaattcgcagagctcgtatacaccggtttctggcacagccctgaatgtgaatttgttcgccactgcatcgacaagtcccaggaacgggtggaaggaaaggtgcaggtatctgtcttcaagggccaggtgtacatccttggccgggagtctccactttcactatacaatgaagagctggtgagcatgaacgtacagggtgactatgaacccattgatgccaccggcttcatcaatatcaactcgctcaggctgaaggagtaccatcgccttcagagcaaggtcaccgccaaatagaccgtgacaaagaggcgcgggcctccccgctctgcagctctcccaggctccagcattaattgttgtgataaatttgtaattgtagcttgttctcctaccacctgactggggctgctgtgccccccctcacctcccccccacccacaggctttgttccctggtcccctatagcctacaaaagtggtcatcgaagggaagggggggtggcaggcagctgcagaaagcgcgtaaaatgacaattaaaagaagttacattagtaaaaaaaataaaaaaaaaaaaaaaaaaaaaaaaaaaaaaaa

SEQ ID NO: 1038 - DNA, 9136 bp, Homo sapiens; identical to SEQ ID NO: 434

SEQ ID NO: 1039 - DNA, 3513 bp, Homo sapiens; identical to SEQ ID NO: 320

SEQ ID NO: 1040 - DNA, 645 bp, Homo sapiens
gggggccttttgtgagtggcagtgaacgagcacgcactgctatgaaggcgtcgggcacgcttcgggagtacaaggtggtggggcgttgcttgccaaccccaaaatgccacacaccgccactgtaccgaatgcgaatctttgcacccaaccatgtggtggccaagtcccgcttctggtactttgtgtcgcagctgaagaagatgaagaagtcatccggggaaattgtgtactgtgggcaggtgtttgagaagtcacccctgcgtgtgaagaacttcggcatctggctgcgctatgattcccgaagtggcactcacaacatgtaccgagagtaccgggacctgaccactgccggcgcggtcacacagtgctaccgagacatgggtgcccgacaccgtgcccgtgcgcactccatccagatcatgaaggtggaagagattgcagctggcaagtgccgccggccagctgtcaagcagttccacgactccaagatcaagttcccattgccccaccgtgtgttgcggcgccagcacaaaccacgcttcaccaccaagaggccaaacaccttcttctagacacagagacccactgaataaaagcttcagactgtcaaaaaaataaaaaaaaaaaaaaaaaaaaaaaaaaaaa

SEQ ID NO: 1041 - DNA, 645 bp, Homo sapiens; identical to SEQ ID NO: 1040

SEQ ID NO: 1042 - DNA, 907 bp, Homo sapiens
tctttccgttcccagcgcagcatggctcgtggtcccaagaaacatctgaagcgcgtagcggctccaaaacactggatgctggataagctgactggcgtgtttgctcctcgtccatccactggtccacacaaactgagggaatgcctgcctctgatcattttcctaaggaacagacttaagtatgccctgactggagatgaagtaaaaaagatttgcatgcagcgattcattaagattgatgggaaagtcaggaccgatataacctaccctgctgggtttatggatgtcatcagcattgacaagactggagagaacttccgtctgatctatgacaccaagggtcgctttgctgtccatcgaattacacctgaggaggccaagtacaagttgtgcaaagtgagaaagatctttgtgggcacaaaaggaatcccacatctggtgacccatgatgcccgtactattcgataccctgatcccctcatcaaggtgaatgacaccattcagattgatttggaaacaggcaagataactgatttcatcaagttcgacactgggaacctgtgtatggtgactggaggtgctaacttggggagaattggtgtaatcaccaatagggagagacatcctggctcttttgatgtggttcatgtgaaagatgccaacggcaacagctttgccactcgtctttccaacatttttgttattggcaagggcaacaaaccgtggatttctcttccccgaggaaaaggaatccgccttaccattgctgaagagagagacaagaggctagcagccaaacagagcagtgggtgaaatggtctctaggagacatgctggaggagtatttgtacctcaacacaacaagcctttctaagcaacatgctagattaaacagcatgatgaaatc

SEQ ID NO: 1043 - DNA, 851 bp, Homo sapiens
cgagcggatgcccaaaggaaagaaggccaaggggaagaaggtggccccggcccccgccgtggtcaagaaacaagaggccaaaaaggtggtcaatcctttgtttgagaaaaggcctaagaacttcggcattgggcaggacatccagcccaaaagagatctcacgcgcttcgtcaaatggccccgctacatcaggctgcagcggcaaagagccatcctctataagcggctcaaagtacctcctgccatcaaccagttcacccaggccctggacaggcaaacagcgactcagctgcttaagcttgcccacaagtacaggccagagacaaagcaggagaagaagcagaggctgctggcccgcgctgagaagaaagctgctggcaaaggggacgtcccaactaagagaccacctgtcctccgagcaggggtcaatacagtcaccactttggtggagaacaagaaggctcagctggtggtgattgcccatgatgtagaccccattgagctggtggttttcctgcctgccctgtgtcgaaagatgggggtgccctactgcatcatcaagggaaaggccaggctggggcgcctggtccacaggaagacatgcaccactgttgccttcacacaggtgaactcggaagacaagggtgctctggctaagctggtggaagctattaggaccaattataatgacagatatgacgagatccgccgccactggggaggcaacgtcctgggtcctaagtctgtggctcgcattgccaagctggaaaaggcaaaggctaaagaactcgccactaagctgggttaaatgtacacttaagttttctgtacataaatataattacaaagtt

SEQ ID NO: 1044 - DNA, 1840 bp, Homo sapiens
cgagaaactacaggcaaactttcagctttgaagttgtcaccttggagaagtgaagtcgagaagtgtgacaccatgaatggacctgtggatggcttgtgtgaccattctctaagtgaagagggagccttcatgttcacatctgaatcggtaggagaagggcatccagataagatctgtgaccagattagtgatgcagtgctggatgcccatctcaagcaagaccccaatgccaaggtggcctgtgagacagtgtgcaagacagggatggtgctcctgtgtggagagatcacctcaatggccatgattgactaccagcgggtggtgagagacaccattaagcacattggctacgatgactctgccaagggcttcgacttcaagacctgcaatgtgctcgtggctctggagcaacagtccccagacattgcccaatgtgtccatctagacagaaatgaggaggacgttggtgcaggagatcagggtctgatgttcggctatgccactgacgagacagaggagtgcatgccgctcaccattgttcttgctcacaaactcaacacccggatggcagatctgaggcgctctggtgtccttccctggctgagacctgattctaagactcaggtaacagttcagtacgtgcaggataatggtgctgtcatccctgttcgcgtccacaccatcgtcatctctgtgcaacacaacgaagacataacactggaggccatgcgagaggccctgaaggagcaggtgatcaaagctgtggtgccagccaagtacctggatgaagacaccatctaccacctgcagccaagtgggcggtttgtcatcggaggtccccagggggatgcaggtgtcacaggccgcaagattattgtggacacatacggaggctggggtgcccatggtggtggtgccttctctggaaaggactacaccaaggtggaccgctcagcagcttatgccgcccgctgggtggccaagtctctggtgaaggctgggctctgccggagagtccttgttcaggtgtcctatgccattggtgtggcagaacctctgtccatttccattttcacctacggaacttccaagaagaccgagcgagacgagctactagaggttgtgaacaagaactttgacctccggccgggtgttattgtcagggacttggatctgaagaagcccatctaccagaagactgcatgctatggtcatttcggaagaagcgagtttccctgggaggtccccaagaagcttgtgttttagagctgccgggaagcttagctctgtcctatactcaacctcctcaagatctcaactccctggtctcagagagccctccctgcttcccaccctatgcaaagccagcttcctccgattttccccctacccggcaatctgcaaacatcttaatagtggcaaggcaggtggtttctggtgctaggtcatcaggtctccttgcaaggatagtcagtgttccctccctgtctctcagatgacaacaatgttaattttgtgtaaaagttgctcctgtcatcccctcccgtagtctgaagctaaccaggccatctcttcctccgtcctggacatgtgcccagatgaatgttttgtcccatatctctggcttcccctttacattggcagccagaggtcctgagccggggcttcctcagggtccctctgagactgggcatctgctccctaggatatggtcagtgtcccctgaacatctgcattctgtgagggactgagctgtgtgttcttcatcccaacacaataaggtggtatcgtcattatccacagtgacagatggggaaactgaggctcagagagcgagctc

SEQ ID NO: 1045 - DNA, 1915 bp, Homo sapiens; identical to SEQ ID NO: 211

SEQ ID NO: 1046 - DNA, 1843 bp, Homo sapiens; identical to SEQ ID NO: 406

SEQ ID NO: 1047 - DNA, 544 bp, Homo sapiens
ctttccggtggcggcgcggcgcggtgaggagctcgtgttcatacttgtagctatgccgtccaagggtccgctgcagtccgttcaagtcttcggacgcaagaaaacagccacagctgtggcccactgcaaacgaggaaatgggctcatcaaggtgaatggacgtcccctggagatgatcgagccgcgcacgctgcagtacaagttactggagcctgttctgcttctgggcaaggagagatttgctggtgtggatatccgggtccgtgtgaagggtggtggtcatgtggcccaaatttatgctatccggcagtctatctcaaaagctctggtggcttattaccaaaaatatgtggatgaagcctctaagaaggagatcaaagatatcctcatccagtacgatcggaccctgcttgtagctgacccccgtcgctgcgaatccaagaagtttggcggtcccggtgcccgtgcccggtaccagaaatcctaccgataagccagtctcaaggatcagggtttacctttgtaataaacatcctgggacttt

SEQ ID NO: 1048 - DNA, 817 bp, Homo sapiens
agcggcgccgggcagaagatggcggtgcagatttccaagaagaggaagtttgtagctgatggcatcttcaaagctgaactgaatgagtttctcactcgggagctggctgaagatggctactctggagttgaagtccgagttacgccgaccagaacagaaatcattattttagccaccagaacacagaatgttcttggggagaagggtcgtcggatcagagagctgactgcagttgtccagaagcggtttggcttccctgaaggcagcgtagagctgtatgcagaaaaagtggccacaagaggtctgtgtgccattgcccaggcagagtctctacgctacaaactcttaggagggcttgcagttcgaagggcctgctatggtgtgcttcggttcattatggaaagtggggccaagggctgtgaggttgtggtctctgggaagctccgaggacagagggccaagtccatgaagtttgtggatggtctgatgattcacagcggagaccctgttaactactatgttgacactgctgtgcgccatgtgctcctcagacagggcgtgctgggcatcaaagtgaagatcatgctgccctgggacccaagtggtaagattggtcccaagaagcctctgcctgatcatgtgagcattgtggaacctaaagatgaaatcttgcccaccacccccatctcagaacagaagggtgggaagccagagccacccgccatgcctcagccagtgcctacagcataacagggtcttggcagctgcatctggaggctggatgttgtcttgtaaagacgtttaataaaatcttgaa

SEQ ID NO: 1049 - DNA, 2445 bp, Homo sapiens
cgcggcgcgctccgctctcccaactcgcagccagtcggcggcgctcccgcctactgagcgcagcctccaccaggatccgcggggaccagctcgggatcagccggcgacccacttctgaccaacccaggagcggcccgatacccactcccgaccaacccgcgaccgacccagggacccactccggacctgctccttacaggggacagcgcctcgccgcttcccgccgcccagcgccgcacgctcctcgggacacagtgccaaccatccagaggacaagatggattggggcacactacagagcatcctcgggggtgtcaacaagcactccaccagcattgggaaaatctggctcactgtcctcttcatcttccgcatcatgatcctcgtggtggccgcgaaggaggtgtggggagatgagcaagccgattttgtttgcaacactctccagcctggctgtaagaatgtgtgctacgaccactacttccccatctctcacatccggctctgggctctgcagctgatcatggtgtccacgccggccctcctggtagctatgcacgtggcctaccggagacacgaaaagaaacggaagttcatgaagggagagataaagaacgagtttaaggacatcgaagagatcaaaacccagaaggtccgtatcgaagggtccctgtggtggacctacaccaccagcatcttcttccgggtcatcttcgaagctgtcttcatgtatgtcttttacatcatgtacaatggcttcttcatgcagcgtctggtgaagtgtaacgcctggccttgtcccaatacagtggactgcttcatttccaggcccacagaaaagactgtcttcacggtgttcatgatctctgtgtctggaatttgcatcctgctaaacatcacagagctgtgctatctgttcattaggtattgctcagggaagtccaaaagaccagtctaatgcattgcctggctgttaagcaaagatgagggagaggatgaggcaacctgtgcttagttatcagagttcagctaccagcatctcccgggcaaacattcccaccttaaatgccgccatttgaagtcccccgcaggcctcccatgaaactccagaagcctccatgggcctcccttcccccaaagctcccaaacaaaggcccaattctatgcctgtattaatgggttctaaagttagttagaccccgtgctggtgtgactatgctttaggatacattcacagtttaaacaaagggatctcacattgtttctcttcctctgaggacaggagacatgagcccagtcctgaggaaggtacagagaaagttccttcttccgggtccccttccccaagttgcccccagttaagggtaaagaatcttcgttctgttattttctttcatagtttaagtttgcaacaatggacaaaagctatttaatgtttcaagctagctgtgtcctttttttttttttaaatgaaaaccttaaaatgataggttcttttgttcttaaaatgatctggaaagcattatacattcctcctatttcagaggttcggtttgtgatgtgagcatggtgtataaccagatctcacaaggtctttaaaacgttggccttttggttatgggaaacctgggctgtggctgagagcccacctactgtattcatccttggtgtgctgagtacagcccgcaacaacgttacagcctgtctcaaatgagacaaactggaagcttctcgtgttagcttctgacaagaagaggccttgattaaaattttcaaccgtaattttgtgtaagaggcagataggttatgcctacaactgccccctgccatgagcctaactcagcccccctccacccccagctcgtctactctgtagctgtgggatgtggcagtcagtatcaaaagacttcatgagtttgcttgggaatttcactgccatggtacaatttaatggtgcagaaacaagatggggtggttttcaaagaaccgatgaaacttctagactctaaatcctgttgattaaaactgagtttttctactttgaatgtctgtttgcctcccttttcagcattgccttctaaactggaaacagaaatgttgatatttggaaaaaatagaagaaactagtttaggtcaatgtgtaacttttctaggacaagttgaaccttagcattgtcattctgcctgatgtgttgtccacaagatgacagtcaacaaatccaacaggggacacttcttcctgccaagaatgtcgttgggaagccattctgtaacaataaataagagttgtggtttcatgcttgtcactgatataattttgtaaactcctaaatgtcatttattaaaatatgattattttgtatactttaaaattaaataaggtttttaatagaataccaaactttaatgatcaatagtaaaaaaaaaaaaaaaaaaaaaaaaaaa

SEQ ID NO: 1050 - DNA, 2445 bp, Homo sapiens; identical to SEQ ID NO: 1049

SEQ ID NO: 1051 - DNA, 3275 bp, Homo sapiens; identical to SEQ ID NO: 241

SEQ ID NO: 1052 - DNA, 1880 bp, Homo sapiens
gggggggggggctgccgatcgcaatggaagaagaaatcgccgccctcgtcattgacaatggctccggcatgtgcaaagctggctttgctggggacgacgcccccagggccgtgtttccttccatcgtcgggcgcccccgacaccagggtgtcatggtgggcatgggccagaaagactcgtacgtgggtgatgaggcccagagcaagaggggtattctgaccctgaagtaccctattgagcacggcattgtcaccaactgggacgacatggagaagatctggcaccacaccttctacaacgagctgcgtgtggcccctgaggagcacccggtgcttctgaccgaggcccccctgaaccccaaagctaacagagagaagatgacgcagataatgtttgaaaccttcaataccccagccatgtacgtggccattcaggcggtgctctccttgtatgcatctgggcgtaccactggcattgtcatggactctggtgacggggtcacacacacagtgcccatctatgagggctacgcccttccccacgccatcttgcgtctggacctggctggccgggacctgacagactacctcatgaagatcctgactgaaaggggctacagctttaccaccactgctgagagggaaattgttcgtgacataaaggagaagctgtgctatgttgccctggattttgagcaagaaatggctactgctgcatcatcttcctctttggagaagagttatgagctgcctgatgggcaggtgatcaccattggcaatgagcgcttccggtgtccagaggctctcttccagccttccttcctgggcatggagtcctgtggcatccacgagaccaccttcaactccatcatgaagtgtgatgtggacatccgcaaagacctgtatgccaacacagtgctgtctggtggtaccaccatgtatccaggcattgctgacaggatgcagaaggagatcacagccctggctcccagcacaatgaagattaagatcattgctcctcctgaacgcaagtactcagtctggattggcggctccatcctggcctcactgtccaccttccagcagatgtggatcagcaagcaggagtatgacgagtcaggcccctccattgtccaccgcaaatgcttctagatggactgagcaggtgccaggcatctgctgcatgagctgattctgaagtatcgatttgccctggcaaatgtacacacctcatgctagcctcatgaaactggaataagcctttgaaaagaaatttgtccttgaagcttgtatctgatatcagcactggatcgtagaacttgttgctgatttttgaccttgtattcaagttaactgttcccttggtatatgtttaataccctgtgcatatcttgatttagtccttagttcatgtggctcggtcacttggtggctggggagatctgtggaaaagtcagtcagtccccagcctagtggatctctgtgagcaccatgtagtgatctgtgcagggtattaaccaacagcagacttccaggatttcccgaggctggcaagggttcctgaactagttaccacttcttttcttgccagtctaacagggtgggaaagtccgagccttaggacccagtttctgttctggttttttccctcctgacctccatgggttgttacttgccttgagttgggaacgtttgcatcgacacctgtaaatgtattcatccttttaatttatgtaaggtttttgtactcaattctttaagaaatgacaaattttggttttctactgttcagtgagaacattaggccccagcaacacgtcattgtgtaaagagaaataaaagtgctgcagtaaaaaaaaaaaaaaaccccccccccccccc

SEQ ID NO: 1053 - DNA, 650 bp, Homo sapiens
cactccgtaagacgaagccatgtctagctcgagcgccaagattgtgaagcccaatggcaagaagcgagacgagttcgagtctggcatctctcaggcgctgctcgagctggagatgaactccgaactgaagacgcagctgtgggaactcaacatcaccgcggcaaaggaaatcgaagtcggtggtggtcgaaaagccatcataatttttgtaccagttcctcagctgaaatctttccagaaaatggccaagtccggcaaggttcgcgaattggagaaaaagttcagtgggaaacacgtagtcttcattgctcagaggaggattctgcccaagccaacccgaaaaagccgtacgaaaaataagcaaaaggcccagaagccgaccctgacgagcagtgcagaccgacgcatccttgaggatttggtcttcccaagtgaaattgtgggcaagaggatccgtgtgaaactggtaggcagccggctcataaaagttcatttagacaaagcacagcagaacaacgtggagcacaaggtcgaaactttttctggcgtgtacaagaagccactaggcaaggatgttaactttgaattcccagaagtttcagtttaaagaaaaatgactgaataaaatgtcattcataataaaaaaaaaa

SEQ ID NO: 1054 - DNA, 535 bp, Homo sapiens
ctctttgcttccagacctccgccatcatgggtcgcatgcacgctcccgggaagggcctgtcccagtcggcgctgccctaccgccgtagcgtgcccacgtggctgaagttgacgtctgacgacgtgaaggaacaaatttacaagttggccaagaaaggcctgactccttcccagataggtgtgattctgagggactcacatggtgtggcacaggtccgttttgtgaccggaaataaaatcttgagaatccttaagtccaaaggccttgcccctgatcttcctgaggatctctaccatttgatcaagaaagcagttgctgtcagaaagcaccttgagaggaacagaaaagataaggatgctaaattccgcctgattctaattgagagcagaattcaccggctggctcgatactataagactaagcgggtgctcccacccaactggaaatatgagtcatccacagcctctgctctggtggcataaatgctgttgcgtacacaagcaataaaatcactttgagtaaaaaaaaaaaaaaa

SEQ ID NO: 1055 - DNA, 664 bp, Homo sapiens
ctttcggttcggaggaggcaacggtgcaactttcttcggtcgtcccgaatccgggttcatccgacaccagccacctccaccatgccgcccaagttcgaccccaacgagatcaaagtcgtgtacttgaggtgcaccggaggcgaggtcggcgccacatccgccttggcccctaagatcggtcctctgggtctgtctcccaaaaaagttggtgatgacatcgccaaggctaccggtgactggaaaggcctcaggattacagtgaaactgaccatccagaacagacaggcccagattgaggtggtgccctctgcctctgccctgatcatcaaagccctcaaggagccaccaagagacaggaagaagcagaaaaacattaaacacaatggaaacatcacttttgatgagattgtcaacattgcccggcagatgagacaccggtctttggccagagaactttctggaactatcaaggagatcctgggtactgcacagtctgtgggctgcaatgtggacggccgccaccctcatgacatcatagatgacatcaacagtggtgcggtggagtgcccagctagttaagaagcaacgagaaggggttgggaatttagctcagtggtagagcgcttgccaagcccaaggccctgggttcagtccccagctccgg

SEQ ID NO: 1056 - DNA, 664 bp, Homo sapiens; identical to SEQ ID NO: 1055

SEQ ID NO: 1057 - DNA, 2326 bp, Homo sapiens
ctcagccagacagtcctcacctgcaacaggtggcctcaggagtcaggaacatctctacttccccaacgacccctgggttgtcctctcagagatggctatggatactacaaggtgtggagcccagttgttgactctggtcgagcagatcctggcagagttccagctgcaggaggaagacctgaagaaggtgatgagccggatgcagaaggagatggaccgtggcctgaggctggagacccacgaggaggccagtgtaaagatgttacccacctacgtgcgttccaccccagaaggctcagaagtcggagactttctctccttagacctgggaggaaccaacttcagagtgatgctggtcaaagtgggagagggggaggcagggcagtggagcgtgaagacaaaacaccagatgtactccatccccgaggacgccatgacgggcactgccgagatgctctttgactacatctctgaatgcatctctgacttccttgacaagcatcagatgaagcacaagaaactgcccctgggcttcaccttctccttccctgtgaggcacgaagacctagacaagggcatcctcctcaattggaccaagggcttcaaggcctctggagcagaagggaacaacatcgtaggacttctccgagatgctatcaagaggagaggggactttgagatggatgtggtggcaatggtgaacgacacagtggccacaatgatctcctgctactatgaagaccgccaatgtgaggtcggcatgattgtgggcactggctgcaatgcctgctacatggaggaaatgcagaatgtggagctggtggaaggggatgagggacgcatgtgcgtcaacacggagtggggcgccttcggggactcgggcgagctggatgagttcctactggagtatgaccggatggtggatgaaagctcagcgaaccccggtcagcagctgtacgagaagatcatcggtgggaagtatatgggcgagctggtacgacttgtgctgcttaagctggtggacgagaaccttctgttccacggagaggcctcggagcagctgcgcacgcgtggtgcttttgagacccgtttcgtgtcacaagtggagagcgactccggggaccgaaagcagatccacaacatcctaagcactctggggcttcgaccctctgtcaccgactgcgacattgtgcgccgtgcctgtgaaagcgtgtccactcgcgccgcccatatgtgctccgcaggactagctggggtcataaatcgcatgcgcgaaagccgcagtgaggacgtgatgcgcatcactgtgggcgtggatggctccgtgtacaagctgcacccgagcttcaaggagcggtttcacgccagtgtgcgcaggctgacacccaactgcgaaatcaccttcatcgaatcagaggagggcagcggcaggggagccgcgctggtctctgcggtggcctgcaagaaggcttgcatgctggcccagtgaaatccaggtcatatggaccgggacctgggttccacggggactccacacaccacaaatgctcccagcccaccggggcaggagacctattctgctgctacccctggaaaatggggagaggcccctgcaagccgagtcggccagtgggacagccctagggctctcagcctggggcagggggctgggaggaagaagaggatcagaggcgccaaggcctttcttgctagaatcaactacagaaaatggcggaaaatactcaggacttgcactttcacgattcttgcttcccaagcgtgggtctggcctcccaagggaatgcttcctggaccttgcaatggcctggcttccctgggggggacacaccttcatggggaggtaacttcagcagttcggccagaccagaccccaggagagtaagggctgctagtcacccagacctggctgttttcttgtctgtggctgaagaggccggggagccatgagagactgactatccggctacatggagaggactttccaggcatgaacatgccagagactgttgccttcatatacctccacccgagtggcttacagttctgggatgaaccctcccaggagatgccagaggttagagccccagagtccttgctctaaggggaccagaaaggggaggcctcactctgcactattcaagcaggaatcatctccaacactcaggtccctgacccaggaggaagaagccaccctcagtgtccctccaagagaccacccaggtccttctctccctcgttcccaaatgccagcctctctacctgggactgtgggggagtttttaattaaatatttaaaactacttca

SEQ ID NO: 1058 - DNA, 2060 bp, Homo sapiens
gttgaggggcaaacaagcggatcagctgactccgccggactgcggtgtcatcctgcctataagccggcgacctctggcattaagctttgctctcttcgggccgtcgcgaccatgcagacccccggcgtcttgctgctcattctcggcctcctggctgcgtcctcctccgcgcttatcagaatccccctgcgcaagttcacatccatccgtcggactatgacggaagtgggaggctctgtggaagacctgatccttaaaggtcccataaccaagtactccatgcagtcatctcctaggaccaaggagccagtgtcagagttactaaaaaactacctggatgcccagtactatggtgagatcggcattgggactcccccacagtgtttcacagtcgtctttgacactggctcctctaacctgtgggtcccctccattcattgcaagctgctggacatagcctgctgggtccaccacaagtacaacagtgacaagtccagcacctatgtgaagaatggcacatccttcgacatccactacggctcaggtagcctctctgggtacctgagccaggacactgtgtcggttccatgtaagtcagacttaggaggtatcaaggtggagaaacagatctttggggaagccaccaagcagcctggagtcgtattcatcgcagccaagtttgatggcatcttgggcatgggctacccttttatctctgttaacaatgtgctcccggtcttcgacaacctgatgaaacagaagctggtggaaaagaacatcttctccttctacctgaacagggacccaaccgggcaacctggaggagaactaatgcttggcggcactgactccagatactaccacggggagctgtcctacctgaacgtcacccgaaaggcctactggcaggtgcacatggaccagctggaggtgggcagcgagctgactctgtgcaagggaggctgtgaggctattgtggacacagggacgtctcttctggtggggcctgtggacgaggtgaaggaactacagaaggccattggggcagtgcctctcatccagggcgagtatatgatcccttgtgagaaggtgtccagcctgcccattatcacctttaagctaggaggccaaaactatgaactacacccagagaagtacatactcaaggtatcgcaggctggaaagacgatctgcctgagtggcttcatggggatggacataccccctcccagtgggccgctctggatcctgggcgatgtctttattggctgctactacaccgtgtttgacagagaatacaatagggtcggctttgccaaggctgccacactctaacttgctccttcttcactgtcagggaactggatcagagtccagtagagaaagccagccagccccatccctccacctgccccactcacacatattcacactcgcctagtgttgctgggcccttgggaggcctggctggagctggtccagctgttctgttctgtggtccctgtccctgggttcagattgctgccctccgcctgtctgaaggaggccaaggcctacccagtacaaaaggctgcctttaaaggcccctactggcttggtagctgccgggatggattgtcttgtcctgctgccctttgctgcgtgggcagcactctgaagcaggcaaatgggtcttgggatccctcccagaaacctgctctgaccagaccctcaggcagcctggggatggcaccaagctctactgccccactatctctggcctggcaaaggcctgaaggtgagcagaaggagcaagaggacagaagcaaaactatatgaacctgggggggggttacctgggacctgaccccaccctcctgggaaggcatgcttcagcctggggcagaggtaggatggctgactggttttggctggcctctgctgccctcatcctgggctagtcagatgggagccaaagttgatatacaaataaagttgttttgggcctcttaaaaaaaaaaaaaaaaaaaaaaaaaaaaaaaaaaaaaaaaaaaaaaaaaaaaaaaaaaaaaaaaaaaaaa

SEQ ID NO: 1059 - DNA, 811 bp, Homo sapiens
tccatcttccctccaggcaccatccaggaggattacctgagggagctgctcaccaccatgggcgaccgcttcacagatgaggaagtggatgagctgtacagggaggcccccatcgacaaaaaggggaatttcaactacatcgagttcacgcgcatcctcaagcacggagcgaaagacaaagatgactgaagagctgtggcttccagccaaatgtccctgttgccattgggtcctcctggagcggtcggctgcccttgcttttctgccttttgcttcccttgttttgtatttattctcagccactttgggccacgtgtaccttcatcatcagactggaaacgggactttctgtcattgttcgatgagaacgtaaggtaatttaacttacagacagtcttgtcccttgtaataactgcagccacagagtcagtatattttttcagagaaagttatccactcaattttttctgaatgataattaaactttctgataaaatacttagttgtttagccttctttccctacttgacttttagttttaccgagtctttccccaagcagggtagatgaggtgaatgacagcctgtcagagtttgctcccactcttcagttgtgtttccagttgtgtttccatcggcaatcccagtttcctctactcctagtttattctctctctccctcctggaaatcaagataaagctccttgggtacccaagactttgtcttccagtttggaaaataaggcctgaattctcgatccctggggtagctcagactccccttaaacgtctctctgcattacttcctgcag

SEQ ID NO: 1060 - DNA, 2175 bp, Homo sapiens; identical to SEQ ID NO: 35

SEQ ID NO: 1061 - DNA, 2812 bp, Homo sapiens
gggatggatccctggatggggccgtctctggatgacctttttctcattctctgctccaaacgttgtctctgtatttccttctgtgaatattttgcagaaccacaatttgaactcctagctaccgacccagcccacgtgcaagacgaaaagggtagaagggagggatcttccggtattaaggtgttaacagtgatgcatcttgggacttgtagttcgcctcaatacgacctgggcggggctccgattgcacgttgggagctgtggagccgtgtggcatgctgggaacgtgaggcgaaaaaggggattgaaaattttcgcccgtgtccccatggatttcgggagactctcgcctatgttacaggagcacttggcacttgaaaaaactcttgtttttgttgtgggaaacacatgaccggggacaaggcaaatttcttgcttccggcgcacccttatcgtcaataggaggcgcccctccgcggcttgttcccggagacttctgggtagcggtttacccccgcccactgcgtcagcatcttcctttcgccgccggacgccgccgaggtcgcacgcgtgaggtctgtccaccgcaaccgagtgagtaccctggccggctggggcgcagatagtggttgggactgagggatggaccgcggccgggagccgagggttgcatattttccgtgatcggaggcctggtgcctcacatggtctcacttgctggttaacaaggagtgggaagcagaaggcctctagggaaacctcaccaccgtaccttccttctctctgtcccattcagcatgcgctacgttgcctcttatctgctggccgccctcgggggcaactccaatcccagcgccaaagacatcaagaaaatactagacagcgtgggcatcgaggcggacgatgaacgactcaacaaggtagcttgctgctcactaggacccactggatccaaatgtctactagtagcggtccttaaatgttaggtccggattttacccttagagaaaatgtataggacctgttgaaaagggtggaaggaggaggcctacacccgtcttagtcatagttttctctttaatccttttgaggaccttgtgcaagtcaaagaaaatccgggcatgacaaaagtcctgctcatcgtgcttttgtagaagtttaatactactcgcttgtgggacttttgagatcaggtttactgtgtagctctgactaacctggaacgcactgtgtaaactagtttccttaactttttcctttttgaaactaacttggcagtaaaggatttacgcccacaagtgagaaacatctggtctccctggatctatagttagggttagctgataaatgtaagtgctgggagtcaaactcttaagatatggtgagtccgagctgtacagtgtgatcttacctggaaaagaacaggtcttcacagaatcttagaattttagtacctaaaacttgccactgccaacatctttgttgagaagacccagtactgtctcacggctagttactggggtagggtacaagtaggacaccttcccgtgtctgtctgtcttgcattactgactgctggttgtggttgtctattccaggtcatcagtgagctgaatggaaagaatattgaggatgtcatcgctcagggtgagttcctgggaagtgaacatgtttgtggtccatcctaatccctgctggtcagcccgtgatctgccaggcttcgcttgtggaccagagcatcctagaaaccctgccagagttgtgcgaggcctttttgtgtgcttgtgccggcagcgcttctgaacacgctggagctggcaatggggtcatttgttgattgctcctaccaggatgtgaaagccttttctgtgagcagggactgggggcactaaaaaattggtgcaggctctttcttaacttttattaggcatacagatttctggtaccaccagactacatcttatttgcaatctgaacagttaactgcacacgagaagcaaaaccagctcagcaactgacctagttagtctgtgaacctcaccccaaaagagctttgggcattgggtcacgctcatggtaaacacgttctcttgatttttagttaactaaaagtttgtgggttttccttttttttatttttttaagattttatataagtacactgtctccatcttcagacacacgagaagagggcatcagatctcatcatagatggttgtaagccaccatatggttgctgggaattgaactcaggacctctggaagagcagtcagtgctcttaaccactgagtcatctctccagcccggaaaacaagtcttaaacagtattaatggtgttcctaagtgtgtgcaaagttgcattgtgttttagagtgaaagcaggtggcagtggtgttccttgtgttggtgagtctacccttacagaacagcctttctggctgggtctctgttctgtctggtctcatgttctttctattttaacataggtgttggcaagctggccagtgtgcctgctggtggggctgtggctgtttctgctgcccctggctctgcagctcctgctgctggttctgcccccgctgcaggtaaatagaggtctgatgagtgggtggtgatcaaagggggggttggtgctcagagtttattttattgttggccggggctcctgggaaaatctggatgcttactatggtgttcctccacagcagaggagaagaaagatgagaagaaagaggagtctgaggagtcggatgacgacatgggatttggcctgtttgattaagatcccctgccaataaagcctttttatgt

SEQ ID NO: 1062 - DNA, 999 bp, Homo sapiens
catcaggtgctctaccgagcgctggtctccaccaagtggctggcggaatccattcggtccggcaaggtggggccaagccttcgggtgctggacgcgtcatggtactcaccagggacccgccaggcacgcaaagagtaccaggagcgacacgtgcctggcgcgtccttctttgatatagaggagtgccgggacacgacttcgccttacgagatgatgctgcccagtgaggcccactttggggactacgtgggcaacctgggcataagcaacgacacacacgtcgtggtatacgatggagacgacctgggcagcttctatgcacccagagtatggtggatgtttcgtgtgtttggccaccgcacagtatcagtgctcaatggtggcttccggaactggctgaaggagggccacccggtgacatctgaaccctcgcggccagagccagccgttttcaaagccacactgaaccgctccctgctcaagacctatgagcaggtcctggagaacctccagtctaaaaggttccagctggtggattctcgggcccagggacggtacctgggcacacaaccggagcccgatgcagtaggactggactcaggccacatccgtggctctgtcaacgtgcccttcatgaacttcctgacagaagatggcttcgagaagagcccagaggagctgcgtgccatattccaggacaagaaggtggacctctcccagccccttatcgccacatgccgcaaaggggtcactgcttgccacattgccctggctgcctacctttgtggcaagcccgatgtggctgtttacgatggctcctggtcagagtggtttcgcagggcccccccggagacccgtgtgtcccaggggaagagtgggaaggcctgagtgtgtgcagcctcctcttccgcccaccagatccagccagttcccttcagtcaggcttgtatgacctgctgaaggttcgcctcttacgcaatggagattgacaggatttta

SEQ ID NO: 1063 - DNA, 999 bp, Homo sapiens; identical to SEQ ID NO: 1062

SEQ ID NO: 1064 - DNA, 556 bp, Homo sapiens
acattctccttctgatagactcaggaagcaatcatggtgctctctgcagatgacaaaaccaacatcaagaactgctgggggaagattggtggccatggtggtgaatatggcgaggaggccctacagaggatgttcgctgccttccccaccaccaagacctacttctctcacattgatgtaagccccggctctgcccaggtcaaggctcacggcaagaaggttgctgatgccttggccaaagctgcagaccacgtcgaagacctgcctggtgccctgtccactctgagcgacctgcatgcccacaaactgcgtgtggatcctgtcaacttcaagttcctgagccactgcctgctggtgaccttggcttgccaccaccctggagatttcacacccgccatgcacgcctctctggacaaattccttgcctctgtgagcactgtgctgacctccaagtaccgttaagccgcctcctgccgggcttgccttctgaccaggcccttcttccctcccttgcacctatacctcttggtctttgaataaagcctgagtaggaagc

SEQ ID NO: 1065 - DNA, 548 bp, Homo sapiens
ctctcttccacaggaggcctacacgccgccgcttgtgccgccgccatgtccctagtgatccccgagaagtttcagcacatcctgcgagtactcaacaccaacatcgatgggcggcggaaaatagccttcgctatcactgccattaagggtgtggggcggagatacgctcatgtggtgttgaggaaagcagacattgacctcaccaagagggctggggagctcacggaggacgaggtggagcgtgtgatcaccatcatgcagaacccacgacaatacaagatccctgactggttcttgaacagacagaaggacgtgaaggatgggaagtatagccaggttctggccaacggtctagacaacaagctgcgtgaggacctggagcggctgaagaaaatccgagcccatagagggctgcgccacttttggggccttcgtgtccggggtcagcacaccaagaccactggccgcaggggccgtactgtgggtgtgtccaagaagaaatgagtctttgggcctttgctgttaataaatagtttatataccaatga

SEQ ID NO: 1066 - DNA, 2137 bp, Homo sapiens
gccgcgtcgcagctccgagactggccccggccgcgacgccgccgcgatgggcaacgccgccgccgccaagaagggcagcgagcaggagagcgtgaaagagttcctagccaaagccaaggaagatttcctgaaaaaatgggaagacccctctcagaatacagcccagttggatcattttgatagaatcaagacccttggcaccggctcctttgggcgagtgatgctcgtgaagcacaaggaaagtgggaaccactatgccatgaagatcttggacaagcagaaggtggtgaagctgaagcagatcgagcacactctgaatgagaagcgcatcctgcaggctgtcaacttcccgttcctggtcaaacttgaattctccttcaaggacaactcaaacttgtacatggtcatggagtacgtgcctggtggggagatgttctcccacttacggcggattgggaggttcagtgagccccacgcccgtttctacgcggcgcagatcgtcttgacttttgagtatctgcactccctggacctcatctaccgggacctgaagcccgagaaccttctcatcgaccagcagggctatattcaggtgacagacttcggttttgccaagcgtgtgaaaggccgaacttggaccttgtgtgggacccccgagtacttggcccccgagattatcttgagcaaaggctacaacaaagctgtggactggtgggctctcggggtcctcatctacgagatggctgctggttacccgcccttcttcgctgaccagcctatccagatctatgagaaaatcgtctctgggaaggtgcggttcccatcccacttcagctctgacttgaaggacctgcttcggaaccttctgcaggtggatctcaccaagcgctttgggaatctcaagaacggggtcaatgacatcaagaaccacaagtggtttgccacaactgactggatcgccatctatcagagaaaggtggaagctcccttcataccaaagtttaaaggccctggggacacgagtaactttgacgactatgaggaggaagagatccgggtctccatcaatgagaaatgtggcaaggagtttactgagttttaggggtgtgcttgtgccccatgggttttcttttcttttttttttttctttttctttctatttttttttctggttgggggtgggggggttggatcgaacagccagagggccctagagttccatgcatctaatttaacatccactccacacccccagggttaaggagagcaggaaagtcagatactggggaaggggcaacatcagctgctccccctctcccttcacctccaccctgcccttcctgttttcaatgaatttcttagctccagtcatactcaatcttgctggtgtatccaggggcgagtagggaaagagggccccaaattcagcctccacccctaccccagcactggatactaaggatgaacagtaaagccaaccttcccttccatgcagccctacctggaaagggagattttatgacctatacagagggctgcttgccagtggggttttttttttttttttcctcatttaaattaagttccaccagtgcctcccaccctccaaattgtcccacccctctcaaccccacccccactccctaaatccattctgatgagacccgggtagccaactgactctgtcaaggaaggaactgggcttggaacctcgccctgagctgctagcctcccggcccccctttccagtggtctcatgccaattgttctgtgcaccagcccccctaagaagcccctccccatcctgggcgctcacttctagcttagctgtcagctgtccatcacctcttgccgtgtgtccccactcactgcacccccaagtctgattgtgctttttctctcaatagaaaggtggggagctgctggggatatgaccccgtttatccctgtgtttatccctctcgtaacttctcccaaaaaggaggagctctcaggcctgggtgggggccccgggtgggcgagaggggccgttcaacctgtgtgcttcgaaggatgagacttcctcttgaacagtgtgctgttgtaaacatatttgaaaactattaccaataaagttttgttttaaaaaaaaaaaaaa

SEQ ID NO: 1067 - DNA, 499 bp, Homo sapiens
ctctttccggacgctcaagatgtcgaagcgaggacgtggtgggtcctccggagcgaaattccggatttccctgggtcttccggtaggagctgtgatcaactgtgctgacaacacaggagccaaaaacctgtatatcatctctgtgaagggaatcaagggacggctgaacagacttcctgctgctggtgtgggcgacatggtgatggccacagttaagaaaggcaaaccagaactaaggaaaaaggtacatcctgcagtggtgattcgacaacgaaagtcatatcgaagaaaagacggggtgttcctttattttgaagataatgcaggggtcatagtaaacaataaaggcgagatgaaaggttctgctatcacaggtccagttgcaaaggagtgtgcagacttgtggcccaggattgcatccaatgcaggaagcattgcctgattctccagtgtgtttgtaaaatatattcattaaagtcttctctctgaaaaaaaaaaa

SEQ ID NO: 1068 - DNA, 499 bp, Homo sapiens; identical to SEQ ID NO: 1067

SEQ ID NO: 1069 - DNA, 631 bp, Homo sapiens
ctgttagcggccagaggtgacctgtgaagatggttcgctactcccttgacccagaaaaccccacgaaatcatgcaagtcaagaggctcaaaccttcgtgttcactttaagaacacccgggaaactgcccaggccatcaagggtatgcatatccgcaaagccaccaagtatctgaaggatgtcactttaaagaagcagtgtgtgccattccggcggtataacggtggagttggtaggtgcgcccaggccaaacagtggggctggacacagggacggtggccaaaaaagagtgctgaatttttgctgcacatgcttaaaaatgcagagagtaatgctgaacttaagggtttggatgtagactctctggtcattgaacacatccaggtgaacaaggctcctaagatgcgcagacggacctacagagctcacggccggattaacccatacatgagctccccctgccacatcgaaatgatcctcactgagaaggaacagattgttccaaagccagaagaggaggttgcacagaagaaaaagatatcccagaagaaattgaagaaacaaaagctcatggcacgggaataaattcagcataaataaatgcggataaagtaaaaaaaaaaaaaaaaaaa

SEQ ID NO: 1070 - DNA, 744 bp, Homo sapiens
ctcttcctgtctgtgccagaactgcgcgtggtccgcgccgatcgactgagaagcccggtttgcgctctcagaatgactgaatgggaaacagccacacccgcggtggcagagaccccggacatcaagctctttgggaaatggagcactgatgatgtgcagatcaacgatatttctctacaggattacattgctgtgaaggagaagtatgccaagtacctgccccacagtgcaggacggtatgctgccaacggtttccgcaaagcacagtgtcccatcgtggagcgccttactaactccatgatgatgcacggtcgtaacaacggcaagaagctcatgactgtacgaattgtcaagcatgcctttgagatcatccacctgctcactggtgagaaccctctgcaggtcctggtgaatgctatcatcaacagtggcccccgagaagactcaacacgcattgggcgggctggaacagtgagacggcaggctgtggatgtatccccacttcgccgagtgaatcaggccatctggctgctgtgcacgggggctcgtgaggctgctttccggaacatcaagaccatcgctgagtgccttgcagatgagctcattaatgctcgcaagggctcctccaactcctatgctatcaagaagaaagatgaactggagcgtgtggccaagtctaaccgctgatttcccagctgctgcctaataaattgtgtgccctttgggacagttacatcaaaaaaa

SEQ ID NO: 1071 - DNA, 744 bp, Homo sapiens; identical to SEQ ID NO: 1070

SEQ ID NO: 1072 - DNA, 497 bp, Homo sapiens
aaagttgctgctaggcgctcgaaagcgagcacctcatctcagagatctggagcggccgcgcttgcggagctgtcaccatgcctctggctagagatctattacacccttccttggaagaggaaaagaaaaaacataagaagaaacggctggttcagagcccaaattcttacttcatggatgtgaaatgtccaggttgctacaagattactacagttttcagccatgctcagacagtggttctttgtgtgggttgttcaaccgtgctgtgccagcccacaggagggaaagccaggctcacagaaggctgttcatttagaagaaagcaacactaatcatctatacaagttcctgaattcgtgtttttcacagaaagccttatcaactttagttactctaccaagacaatgtaattattgtttgattttataaagtctacaacaatgatctcctattttggtgtcagtttttcaataaagttttacttatgaacaagttca

SEQ ID NO: 1073 - DNA, 498 bp, Homo sapiens
tgtgtgcgatcgcggtggatcgctaccatgaaccacacttctcaagccttcgtgaacgctgccactgggggacaacccccaaactacgaaagaatcaaggaagaatatgaggtgtctgaactgggggctccccacggatcggcttctgtcagaactaccgtgatcaacatgcccagagaggtctctgtgcctgaccatgtggtctggtccctgttcaatacgctcttcatgaacttctgctgcctgggcttcattgcctatgcctactctgtgaagtctagggatcggaagatggtgggtgatatgactggagcccaggcctacgcatccactgccaaatgcctgaacatcagctccctggtcctcagcatcctcatggtcattatcactattgttactgtcgtcatcattgctcttaatgctcctcgtctccagacttgatagaggattctggtttctgatcctgacgtgcttcacgctctgctggctgcccttttt

SEQ ID NO: 1074 - DNA, 843 bp, Homo sapiens
ctcttttggccttgcttgccggcagactcgccgccatgggccgtgtgatccgaggccagaggaaaggtgccggttctgtgtttcgtgcgcacgtgaagcaccgtaagggagccgcgcgtctgcgtgctgtggacttcgcggagcgacacggctacattaaaggcatcgtaaaggacatcattcatgaccctggccgcggcgctcccctcgcgaaagtagtctttcgtgatccctatcgattcaagaagcggacagagctgttcattgccgcagagggaatccacactggacagtttgtgtactgcggcaagaaggcccagctgaatattggcaatgttttgcccgtgggcaccatgcctgagggtactatcgtgtgttgtctggaggagaagcctggggacaggggcaagctggcacgagcctccgggaactatgctacagtcatctcccacaacccagagaccaagaagacccgagtgaagctgccttcagggtccaagaaggtcatttcctctgctaaccgagctgttgttggtgtcgtggctggcgggggcagaattgacaagcctatcttaaaggctggccgtgcctaccataagtacaaggcaaagaggaactgctggccacgtgtgcggggtgttgccatgaatcctgtggagcatccctttggcggtggtaaccaccagcacattggcaagccttccactatccgaagagatgccccagctgggcgcaaagtgggtctcattgctgctcgccggactggacggctacgtggaaccaaaactgtacaggagaaggagaactagagttcaggagctaataaagtatgtgctttggcta

SEQ ID NO: 1075 - DNA, 843 bp, Homo sapiens; identical to SEQ ID NO: 1074

SEQ ID NO: 1076 - DNA, 585 bp, Homo sapiens
tcttcctgttctccaccatggcgcaagatcagggtgaaaaggagaaccccatgcgggaacttcgtatccgcaagctctgcctcaatatctgcgtgggggagagtggagacagactgacccgagcagccaaggtgttggagcagctcacaggccagacccctgtgttttccaaagctagatacaccgtcaggtcctttggcatccggcgaaatgagaaaatcgctgttcactgcactgtccgtggagccaaggcagaggagattctggagaaaggcctgaaggtgcgagagtacgaattacggaagaataacttctcagataccggcaactttggctttgggattcaggaacacattgacctaggcatcaaatatgacccaagcattggcatctatggcctggatttctatgtggtgctgggtaggccaggtttcagcatcgcagacaagaagcgcagaacaggctgcattggggccaaacacagaatcagcaaagaggaggcaatgcgctggttccagcagaagtatgatggcatcatccttcctggcaaataaactttatccaaaggccaataaagttttctca

SEQ ID NO: 1077 - DNA, 1320 bp, Homo sapiens; identical to SEQ ID NO: 104

SEQ ID NO: 1078 - DNA, 2113 bp, Homo sapiens
gcgcaggcaagaccatgtggatcctggtgagctggctggccttagtggcaaggctggtggctggaacacagtgcccagatggtcaattctgccctgttgcctgctgccttgaccagggaggagccaactacagctgctgtaaccctcttctggacacatggcctataataacgagccgtcgtctagatggctcctgccagatccgtgaccactgtcctgatggctactcttgtcttctcactgtgtctgggacttccagctgctgcccgttctctgagggtgtatcttgtgatgatggccagcactgctgcccccggggcttccactgtagtgcggatgggaaatcctgctctcagatatcagatagcctcttgggtgctgtccagtgtcctggtagccagttcgaatgtcctgactccgccacctgctgtattatgattgatggttcctgggggtgctgccccatgccccaggcctcttgctgtgaagacagagtgcattgctgtccccacggggcctcctgtgacctggttcacacgcgatgcatttcacccacgggcacccaccccttactaaagaaattccccgcacaaaggaccaacagggcagtggcttccttttccgtggtgtgccctgatgctaagacccagtgccctgatgactctacctgctgtgagctacccactgggaagtatggctgttgtccaatgcccaacgccatctgctgttccgaccacctgcactgctgcccccaggacactgtatgtgacctgatccagagcaagtgcatatccaaggactacaccacagatctcatgaccaagctgcctggatacccagtgaatgaggtgaagtgcgacttggaggtgagctgtcctgatggctacacctgctgccgcctcaacactggggcctggggctgctgtccattcaccaaggctgtgtgttgtgaagaccacattcactgctgcccagccgggtttcagtgtcacacagagacaggaacctgtgaactgggagtccttcaggtaccctggatgaaaaaggtcacggcctccctcagcctgccagacccacagatcttgaagaatgatgtcccctgtgatgacttcagtagctgtccttctaacaatacctgctgcagactcagttctggggactggggctgctgtcccatgccagaggctgtctgctgcttagaccaccagcattgctgccctcagggtttcaaatgtatggatgaggggtactgtcagaagggagacagaatggtggctggcctggagaagatgcctgtccgccagacaactctgctccaacatggagatattggttgtgaccagcataccagctgcccagtagggcaaacatgctgcccaagcctgaagggaagttgggcctgctgccagttgccccatgctgtgtgctgtgaggaccggcagcactgttgcccggctgggtacacctgcaacgtgaaggcgagaacctgtgagaaggatgcaggctctgtccagccttccatggacctgacctttggctctaaggttgggaatgtggaatgtggtgccggacatttctgccatgataaccagtcctgttgtaaagacagccaaggaggctgggcctgctgtccctatgtaaagggtgtctgctgtagagatggacgtcactgttgtcccattggcttccactgttcagccaagggaaccaagtgtttgcggaagaagacccctcgctgggacatacttttgagggatccagccccaagaccgctactgtgaggaagggctaacgactaaagaactccacagtcctgggaaccctgttctgagggtatccaccactcaggcctccctggcacctcttcctttagtctccccggcctactcattctgagtcaccccatcaccatggaaggtggggcctcaaactaagaccttctcttatggaaagaaggctgtggcaaaagccccgtatcaaactgccatttcttatgatttctgtggaccttgtggccaggtgctcttctcgatccacaggtgttgtgtgagcttgcttttgtgtgtgtgtgtgtgcgcgcgtgcgagcgtgttgctccaataaagtttgtacc

SEQ ID NO: 1079 - DNA, 893 bp, Homo sapiens
ccaataaggaaactctgaaccaggagtcatggaagtcaaacccaagctctactactttcaaggcaggggaaggatggagtcgatccgctggctgctggctacagctggagtggagtttgaagaagaatttcttgagacgagagaacaatatgagaagttgcaaaaggatggatgcctgctttttggccaagtcccattggtggaaatagacgggatgctactgacacagaccagagccatcctcagctacctggccgccaagtacaacttgtatgggaaggacctgaaggagagagtcaggattgacatgtatgccgatggcacccaggacctgatgatgatgattatcggggctccatttaaagcccctcaggaaaaagaagagagcctagctttagcagtgaagagggctaaaaaccgttacttcccagtgtttgaaaagattttaaaagaccatggagaggcatttcttgttggcaaccaactcagttgggcagacatacagctactagaagccattttgatggtggaagaagtcagtgctcctgtgttgtctgacttccctctgctgcaggcatttaagacaagaatcagcaacattcctacaattaagaagttcctgcaacctggaagtcagaggaagccacctccggatggccactatgttgacgtggtcaggaccgtcctgaagttctagtgacagcgtgctttaaagtggctactgcaagggtccaatcacagcagcagctacagagcattccagaggcaagatagagctctcaggagtaaaggtcttcaaagaacctgaaaaccactctgtccaacaatgacaaatgccaattaaatagagtgaaaaactgttaaaaaaaaaaaaaaaaaaaaaaaaaaaaaaa

SEQ ID NO: 1080 - DNA, 893 bp, Homo sapiens; identical to SEQ ID NO: 1079

SEQ ID NO: 1081 - DNA, 2040 bp, Homo sapiens; identical to SEQ ID NO: 370

SEQ ID NO: 1082 - DNA, 2141 bp, Homo sapiens
ccacaatgcgcctctaccctctggtctggctttttcttgctgcgtgcacagcttgggggtacccatcctcaccacctgtggtgaacactgttaaaggcaaagtcctggggaagtatgtcaatttggaaggatttgcacagcctgtggctgttttcctgggaatccccttcgccaagccccctcttggctccttgaggtttgctccaccacagcctgcagagccttggaactttgtgaagaatactacctcctacccacctatgtgctctcaagatgctgttggagggcaggttctctcagagcttttcaccaacaggaaggaaaacattcctttacagttttctgaagactgcctctacctgaacgtttatactcccgctgacttgacaaagaacagccggctaccagtgatggtgtggatccatggaggtggactggtagtgggtggagcatccacctatgatggacaggtcctctctgcccatgaaaatgtggtggtggtgaccattcagtatcgccttggcatctggggattcttcagcacaggggatgaacacagccagggcaactggggtcacttggaccaggtggctgcactacactgggtccaggacaacattgccaactttgggggtaacccaggctctgtgaccatctttggagaatctgcaggaggtttcagtgtctctgctcttgtgttatctcctctggccaagaacctcttccacagggccatttctgagagtggtgtggtcctcacttctgctctgattacaacagatagcaagcccattgctaatctgattgctactctttctgggtgtaaaaccaccacatcagctgttatggttcattgcctgcgccagaagacagaggatgaactcctggagacttcattaaaattgaatcttttcaaactggacttacttggaaacccaaaagagagctatcccttcctacctactgtgattgacggagtggtgctgccaaagacaccagaagagatcctggctgagaagagtttcaacacagtcccctacatagtgggcatcaacaagcaagagtttggctggatcattccaacgcttatgggctatccactctccgaaggcaaactggaccagaaaacagccaaatccctcttgtggaagtcctacccaacactgaaaatctctgagaaaatgattccagtggttgctgagaagtacttcggagggacagatgaccctgccaaaaggaaagacctgttccaggacttggttgcagatgtgatgtttggtgtcccatcagtaatggtgtctcgaagtcacagagatgctggagcccccaccttcatgtatgaatttgagtatcgcccaagctttgtatcagccatgaggcccaagacagtgatcggagaccatggtgatgaactcttctcagtatttggatctccatttttaaaagatggtgcctcagaagaggagaccaatctcagcaaaatggtgatgaaatactgggccaactttgctcggaatgggaaccctaatgggggagggctgccccattggccagaatatgaccagaaggaagggtacctgaagattggtgcctcaactcaggcagcccagaggctgaaggacaaagaagtggctttttggtctgagctcagggccaaggaggcagcagaggaaccatcccactggaaacatgttgagctctgatcaggagggtcagccatgtttgagaacctggagctaaaggggaattattccacagaagattttgtaaagacataacacttcttgtctttgagactataacatcacatggtattttgtacaaatgcattaaagggaaaatacttaaccttattgcttcaacttgtaaaataaaacagactgaattttgcatggtgttctttgaagcggccacttgttgacaatttcatggatgccccagagagcccaagctctgcgttcaactcacctccaggagtaatatcctacgtcagcgttgacagtcagtcgagcgatgtcgaatgtctcgatgacattactgtcccacttctttcggtattctatgtcgtgcaggacatcgtagagcgtctcagctggtacgtcacagcattccatcctgcacttgatcttgtgcagagttcg

SEQ ID NO: 1083 - DNA, 3392 bp, Homo sapiens
agaacataattcaatccggtcagcacctcctctttctgcattcacagcagactccaccgaatccacgcacacttccataagaaatccatttcctgctcccgccttccccgacgatatccacgcctgtttccgctcggccccctccttcccgctcgcctcgcgctccccgggcgccctcgttctcgcgctctccaaggcaagcgcgctcccggccggcgcgtccgggctccgcttctcccggctcctgtcagtgcggtgattgcgctgggaaacatggcgaccgagggaatgatcctcacaaaccacgaccatcaaatccgtgtcggagtcctcacagtgagtgatagctgcttcaggaatcttgcagaagaccgcagtgggataaatctaaaagatctcgtccaggatccttctttgttgggtgggactatatcagcatacaagatagtaccagatgaaatagaagaaatcaaggaaacactcatagactggtgtgatgagaaggaacttaatttgatattaacaactggcggaacagggtttgcaccacgagatgtcactccagaggccacaaaagaagtaatagaacgggaagcgccagggatggccctggcaatgctgatgggatcacttaatgttacacctctgggcatgctctctagaccagtgtgtggaataagagggaaaactctgataattaacctgcctggtagcaagaaaggatctcaggaatgctttcagttcatactgccagctctacctcatgccattgaccttttacgtgatgccattgtaaaagtaaaggaggtgcatgatgaacttgaagatttaccttccccaccacctcctctttctccacctcctacaactagcccacataagcagacagaagacaaaggagttcagtgtgaagaggaggaagaagaaaagaaagacagtggtgtagcttcgacagaagatagttcctcatcacatattactgcagcagctcttgctcgaaagattccagactccatcatttctcgtggcgttcaggtgctcccacgagacacagcctcccttagcactactccttcagagtcgccccgtgcccaggctacatctcgcctctctacagcttcttgtccaacaccaaaagtccagtccaggtgcagcagcaaggagaacattctaagagccagtcacagtgctgtagatatcaccaaggtggctagaagacatcgcatgtctccttttcctctgacgtctatggacaaagccttcattacagttctggagatgactccggtgcttggtacagaaatcatcaattaccgagatggaatggggcgagtccttgctcaagatgtgtatgcaaaagacaacctacccccattcccagcatcagtaaaagatggctatgctgttcgagctgctgatggtccaggagatcgtttcatcattggggaatcccaagctggtgaacagccaactcagacagtaatgcccggacaagtgatgcgggttacaacaggtgctccaatcccctgcggtgctgatgcagtagtgcaagttgaagatactgaactcatcagggaatcagatgatggtactgaagaacttgaagtgcgaattctggtgcaagctcggccaggccaagacatcagacccatcggccacgacattaaaagaggggagtgtgttttggcaaaaggaacccatatgggcccttcagaaattggtctccttgcaactgtaggtgtcacagaagttgaagttaataagtttccagtggttgccgttatgtcaacagggaatgagctactaaatcctgaagatgacctcttaccaggaaagattcgggacagcaatcgatcaacacttctagcaacaattcaggaacatggttacccaacaatcaacttgggaattgtaggagacaacccagatgacttactcaatgccttgaatgagggtatcagccgtgctgatgtcatcatcacgtcaggaggtgtatccatgggggaaaaggactatctcaagcaggtgctggacatcgatcttcatgctcagatccattttggcagggtttttatgaagccaggcttgccaacaacatttgcaactttggatattgatggtgtaagaaaaattatttttgcactaccagggaatcctgtatcagctgtggtcacctgcaacctctttgttgtacccgcactgagaaaaatgcagggtatcttggatcctcggccaaccatcatcaaagctaggttatcatgtgacgtaaagctggaccctcgcccagaataccaccggtgtatactgacttggcatcaccaagaaccactgccctgggcccagagtacaggtaatcagatgagcagccgtctgatgagcatgcgcagtgccaatggattgctgatgctacctccaaagacagagcagtatgtggaacttcacaaaggcgaggtggtggacgtcatggtcatcggacggctatgatggtgaccaacaggagaaagtttcgatgcatgtccacatatcattgactgtatcctgtcatatgcaacggcacagctagtttttctgatctggataaaagttgatctgtatagtcaacatcttgaactatatttcaaatgaatttaaataccttttaaagaaaaaacacacctaagaataaatctcaacagacaactctattctggttatatcaaagcaaaattttcctttcttgcaaattgctttgtgtgttcaatgctaggtctgatagcgatagctttagtagacagcggtaggtgcctgcagaacttgtgtttttctcatctttaaatacaactacttatgctcttaatcaaggctgtctgcttctttatactagtgtaggcaacacttggatttcccttcttagtatgcttcataactgctttacagagagcttttgcttgttctttctcatgtatctcgtgtttatgtgcaccatgccaaaagacgagtgactgcgcggaggccccgctctgcctcaagagccttccctgctgagcacccagggaagctctcaccctcgcagcctctggcacacacagtactagcaggcagtaactggataccttttatttgaacaaacaaacggggtggggggaaatgcttccttaagtgctgacagcctttttaaccaacacatttaaaattgtacagaacaaaaataaaatcaaagactgatcttgtacagatattagtgttaccagcattcatgtggaatcaagagcaaaaataaaataatgttaaacaactctgtaccataacattttctgtaatgataatgaaacttaatgaataaaaaaaaatccttgatcattatttaaaaaaaaaaaaaaaaaaaaaaaaaaaaaaaaaaaaaaaaaaaaaaa

SEQ ID NO: 1084 - DNA, 129 bp, Homo sapiens
ttgctcagcgccacaggtaggcgcggggtggggaagcagggaatgcacaaggcggcaagggttggaaggacgggagagagaaaaggtggaaaacacaggatgtaatccctctcttctctacctccccca

SEQ ID NO: 1085 - DNA, 1959 bp, Homo sapiens
ccacctataatttattccacctctggcaaaggactgcaaaggcagccaggaaggagattcatcttcacatggacgagatggcaaccactcagatttccaaagatgagcttgatgaactcaaagaggcctttgcaaaagttgatctcaacagcaatggattcatttgcgactatgaacttcatgagcttttcaaggaagcgaatatgccattgcccggatataaagtgagagaaattattcaaaaactcatgctggatggcgacagaaataaagatgggaagataagctttaatgaatttgtttatattttccaagaggtaaagagcagtgacattgctaaaaccttccgcaaagccatcaacaggaaagaagggatttgtgctctgggaggaacttcagagttgtccagtgaaggaacccagcattcctactcagaggaagaaaaatatgctttcgttaattggataaataaagctttggaaaatgatcccgattgcagacatgtcatacccatgaacccaaatactgatgacctattcaaagcagttggtgatggaattgtgctctgcaaaatgatcaacctttctgttcccgatacaattgatgagagagcaatcaataagaagaagcttacacccttcatcattcaggaaaacttgaacttggccctgaattctgcttctgccattggatgtcacgttgtgaacattggtgccgaagatctgcgtgccgggaaacctcatctggtcttgggactgctctggcagattattaagattggcttatttgctgacattgaattaagcaggaatgaagcactggcggctttgcttcgagatggtgagactctggaggagcttatgaaattgtctccagaagagcttctgctgagatgggccaacttccatctggaaaactcaggctggcaaaagatcaacaacttcagtgctgacatcaaggattccaaagcctatttccatctactcaatcaaattgcaccgaaaggacagaaggaaggggaaccacggatagatattaacatgtcaggtttcaacgaaacagatgatttaaagagagccgaaagtatgcttcagcaagcagataaattaggctgcagacagttcgttaccccggctgatgttgtgagcggaaaccccaaactgaacttggcctttgtagccaacctctttaataaatatccagcactaactaaacctgagaaccaggatattgattggactcttctagaaggagaaactcgtgaagaaagaacctttcgtaactggatgaactctcttggtgtgaatccccatgtcaaccatctctatgttgacctgcaggatgccctggtgatcttacagctgtatgagagaattaaagttcctgtggactggagtaaagttaacaagcctccatacccaaagctgggtgccaacatgaaaaagttagaaaactgcaactatgcagttgaattagggaagaatcaggctaaattctccttggttggcattggaggacaagacttgaatgatgggaacccaaccttgaccttggctgtagtctggcagctgatgagaagatatacccttaatgttatggaagatcttggagagggtcagaaagcaactgatgacatcattgtaaactgggtcaatggaacattgagtgaagctggaaagtcaacttctattcagagttttaaggacaagacgatcagctccagtttggcagttgtggatttaattgatgccatccagccaggctgcattaactatgaccttgtgaagactggaaatctaacagaagaagacaagcacaataacgccaagtatgcagtgtcgatggctagaagaataggagccagagtgtatgctctccctgaagaccttgtggaagtaaaaccgaagatggtcatgaccgtgtttgcctgtttgatgggcaggggaatgaagagtgtaa

SEQ ID NO: 1086 - DNA, 2093 bp, Homo sapiens
ctctggtctcatctctgccacgccactgctcagaggcacagagtgagcaacagtttggtagcgctgagtccatccactggaaattctcctcctgtctcagcggctttagctctgcagaaatgaagcatccagcctacactctccttctctctctcatcatgtctatgtgtgctgggagcaaaggccttgctgagcagctaactaaggaaaacctgaccgtgtccctcctgcctcctaacttccacaaagagaacacagtcaccaatgactggattccagaaggagaggaagatgacgactacctggacctggagaagctgctcagtgaagatgacgactacatctatgttgtcgatgcagtttccccaacagactcagaatcaagtgctggcaacatcctgcagcttttccaaggcaaaagccggatccagcgccttaacatcctcaatgcaaagtttgccttcaacctttaccgagtcctgaaggaccaggctacctcttctgataacattttcatagcacccgttggcatttccactgccatggggatgatctccttaggtttgaggggagagacccatgaggaagtacactcagttctacacttcaaagactttgtcaatgctagcagcaagtacgaggtgacaaccattcacaacctctttcgaaagctgacccatcgcctattcagaaggaattttgggtacacacttcagtcagttaatgacctttatattcagaagcagtttcccatacgggaggacttcaaagctgccatgagagagttttactttgctgaggcccaggaggctgacttctcagatcctgccttcatatcaaaggcaaacagccacattctgaagctcaccaagggcctcataaaagaagctttggagaatacagactctgctactcagatgatgattctgaactgcatctacttcaaaggagcttggatgaataaattcccagtagaaatgacgcataaccacaacttccggctgaatgagagagaagtagtaaaagtctccatgatgcaaactaaagggaacttccttgcggcaaatgaccaggagctagactgtgacattctgcagctggagtatgtagggggcatcagcatgctaattgtaattccacggaagctgtcgggaatgaagactcttgaagcacagcttacaccccaggtagtggagagatggcaaaaaagcatgacaaacagaacccgagaggtacttctgcccaagtttaagcttgagaagaattacaacctggtggaggtcctcaagtccatgggaatcacaaagctcttcaacaagaatggcaatatgtcaggcatctcagaccagaggatcatcattgatctgttcaagcaccagagtaccatcacagtgaatgaagagggtacccaagctgcagctgtaactacagtggggtttatgccgctgtctacccaagtcagattcactgttgaccgtcccttcctgttcctagtgtatgagcaccgaaccagctgtctgctgttcatgggaagagtggccaaccctgccaagtcttaatggtgctggtctgggcacctgatgtagtttggggacactctgtaatcctgttttcattctaagaggacagagatattttgatattgataatctatgtagtttgagataataatctaacagtaaacagtgtcataagtgcacagatgttaatgcaactaatggtcgtgccagctattccctagaggtcctagacacagactgcctcagcgccaacgcctctgtcactgagaatgggcagagtggagctgacactttctcctcagttagccgtaccagtcaaggtgtctcctcagccaggcccctccatatggatggtactgaggaactctcacccttccagggaggatgtccaaggagcaccattcttgcctagtggaaaagaaacctcaacatgtctgagacatttggacttaattcaaggctgaaccttttaaattcatgtaaatatcatctgttctgctttgtgtcaatagggctaccatagcctattctagagacaaataaacaaccatatttactaagcaaaaaaaaaaa

SEQ ID NO: 1087 - DNA, 896 bp, Homo sapiens
gaatatatttgatcggaagatcaactttgatgccctcttaaaattttcccacataactccctccacacagcagcacctaaagaaggtctatgccagttttgcactgtgcatgtttgtggcagcagcaggggcctatgtccatgtggtcacacgtttcatccaggctggcctgctctctgccctgggcgccctggccttgatgatttgcctgatggccacacctcacagccatgagacggagcagaagaggctgggactgctcgccgtcgccttccttacaggagttggcctgggacctgccctggagctgtgcattgccatcaaccccagcatcctccccacggccttcatgggcacggccatgatcttcacctgcttcagcctgagtgccctctacgccaggcgccggagttacctctttttgggaggtatcttgatgtcagccatgagcctcatgttcgtgtcctctctggggaaccttttctttggatccatttggctgttccaggcaaacctgtacatggggctgctggtcatgtgcggctttgtcctcttcgacactcagctcattattgaaaaggctgaacacggagacaaggattacatctggcactgcattgacctcttcttggacttcgttacactcttcaggaagctcatgctgatcttggccttcaatgagaaggacaaaaagaaagagaagaagtgacgtggtgatcgatcggcctctcccagctcgccttctctccctcagccccgtttctttgcacacatcacaggtgtcgtgtcccatgaaatgaaaagcatcaggaaagcttttgtactttgtggttttctctattttgaattttttgatcaaaaaactgattagtgaatatagtttggagtttggcttc

SEQ ID NO: 1088 - DNA, 722 bp, Homo sapiens
tcctttccgctcggccgttctcctgtacaggaggcagccatggcgcccagccggaatggcatgatcctgaagccccacttccacaaggactggcagcagcgagtggacacgtggttcaaccagccggcccgcaagatccgcagacgcaaggcccggcaggcgaaagcgcgccgcatcgcccctcgccccgcgtccggtcccatcagccccatcgtgaggtgccctacagttagataccacaccaaggtccgggctggcaggggcttcagcctggaggagctcagggtggctggtatccacaagaaaatggcacgcaccatcggcatctccgtggacccaaggaggcgaaacaaatccacggagtcactgcaggccaacgtgcagcgcctgaaggagtaccgctccaagctcatacttttccccaggaagccttctgctccgaagaagggagacagttctgctgaagaacttaaattggccacgcagctaacaggacctgtgatgcccatccggaatgtgtacaaaaaggagaaggccagagccatcacggaagaggagaagaactttaaggctttcgccagccttcgcatggcccgagccaatgcccggctcttcggcatccgagcaaagagggcgaaagaagccgcagagcaagacgttgagaagaagaaataatgcgcggctggagagttgtaataaattttccataaagcaaaaaaaaa

SEQ ID NO: 1089 - DNA, 1178 bp, Homo sapiens; identical to SEQ ID NO: 351

SEQ ID NO: 1090 - DNA, 443 bp, Homo sapiens
caagatcatcgaagacctgagggctcagatctttgcgaattctgtggacaatgcccgcatcgtcttgcagatcgacaatgcccgtcttgccgctgatgactttagagtcaagtatgagacggaactggccatgcgccagtctgtggagagtgacattcatggactccgcaaggtggtggatgacaccaacatcacgaggttgcagctggagacagaaatcgaagcgctcaaggaggagctgctgttcatgaagaagaatcatgaggaggaagtccaaggcctggaagctcagattgccagttctgggttgactgtggaagtggatgctcccaaatctcaggacctcagcaagatcatggcggacatccgtgcccagtatgaacagctggctcagaagaaccgtgaggaactggacaagtactggtctcagcagattgaggaga

SEQ ID NO: 1091 - DNA, 1904 bp, Homo sapiens
gagcgactgcgggcccaggttgtcgcgctgcgctcggtgagtacaggatccagcttccaggatgtggtggtccttgatccctctctcttgtctgctggcactgaccagtgcccatgacaagccttcctcacacccactgtcggacgacatgattaactatatcaacaaacagaatacaacatggcaggctggacgcaacttctacaatgttgacataagctatctgaagaagctgtgtggaactgtcctgggtggacccaacctgccggaaagggttgggttcagcgaggacataaatctacctgaatcctttgatgcacgggaacagtggtccaattgcccgaccatcgcacagatcagagaccaggggtcctgtggctcttgttgggcatttggggcagtggaagccatgtctgaccgaatctgcattcacaccaatggccgagtcaatgtggaggtgtctgctgaggacctgcttacctgctgtggtatccagtgtggggatggctgtaatggtggctatccctctggagcatggaacttctggactagaaaaggcctggtttctggtggagtatacaattctcatataggctgcttaccctacaccatccctccctgtgaacaccatgtcaatggctcccgtcccccatgcactggagagggagatactcccaagtgcaacaagatgtgtgaggctggctactccacatcctacaaggaagataagcactatgggtacacttcctacagtgtgtctgacagcgagaaggagatcatggcggaaatctacaaaaatggcccagtggagggtgcttttactgtgttttctgacttcttgacttacaaatcaggcgtatacaagcatgaagccggtgatgtgatgggaggccatgccatccgcattctgggctggggaatagagaatggagtaccctactggctggtagcaaactcctggaacgttgactggggtgataatggtttctttaaaatcctcagaggagagaaccactgtggaattgaatcagaaatcgtggctggaatcccacgcactcagcagtactggggaagattctaatctgctgggacttgattgtatagtccttaggagactttttccaaaatttagcaatgcaggcagggagtgaggcagataggagtctttgattctttgagttcacctaacatgcatgaagctttcagcaaggtttgggtgactggaccagagctgccccccatcagagccaccctacctggctcccttctagcctatcccatgacagtgatcacagcctacatcctagcctctccctagactagtgctgtgtgtagcgcctgctgctgtggctctgtctgccatccctcccacccccacctcagcatccccagaccaagggctttggctgcaggatttccaaaggaatgaacaccaactacatgatgagaggacagatgccacccgccagctgcaccttgaagctagtcacttctaggactgtggcaggctttgatggcccaatgcagttctctggagaaaactacctttccccaaggcatctgcacccattgacaatggtaatgtgcccatctctccttggtcctgccctcaaccgatgcttttccagtcagggttttgttttttgttttgttttgtgtacctcaactgagttatgaagatttgtactggttttacagatcatctcatcgtatggaaaagaacaagcttcgtggtcagtttactgggtgaccggcagacaccacaatcaaactagtctggggaaaacctgcttttttgttgtaggtgccacgtaaccctgtcagtttgacaaggaatgaccgtgccaataaaccaattctccctctgcttggaaaaaaaaaaaaaaaaaaaaaaaaaaaaaaaa

SEQ ID NO: 1092 - DNA, 3368 bp, Homo sapiens
cgaccgacctgcagttgagccgagttggaaatgtgaacgcaagaagcaggcttgatttttttttcctccccccctctcctagctctctcctcctctctctccctctcgcacccacactcacgcacacctccagcccgcacacagacgtgcacgcaccccccgccgcccggcagttatgtattctccgctctgtctcacccaggatgagtttcatcctttcattgaagcacttctgccccatgtccgcgccttcgcctacacatggttcaacctgcaggcccgaaagcggaaatacttcaaaaagcatgagaagcgcatgtcgaaagaagaggagagggctgtgaaggatgaactgctaagtgagaagcctgaggtcaagcaaaagtgggcttcccgacttctggccaagttacggaaagatatccgacccgagtaccgagaggattttgttcttacagttacagggaaaaaacctccatgctgtgttctttccaacccagaccagaaaggcaagatgcggagaattgactgcctccgccaggcagataaagtatggaggttggacctcgtcatggtgatcttgttcaaaggtattccgctggaaagtactgatggtgaacgccttgtgaagtccccacagtgctcgaatccagggctctgtgtccagccccatcacataggggtttctgtaaaggaactcgatttatatttggcatactttgtacatgcagcagattcaagtcaatctgaaagtcccagccaaccaagtgatgctgacattaaggaccagccagaaaatggacatttgggcttccaggacagcttcgtcacatcaggtgttttcagtgtgactgagctagtaagagtgtcacaaacaccaatagctgcaggaaccggccccaatttttctctctctgatttggaaagttcctcatactacagcatgagtccaggagcaatgaggaggtctctacccagcacatcctctaccagctctaccaagcgcctcaagtctgtggaggacgaaatggacagtcctggtgaagaaccattttacacaggccaagggcgctccccagggagtggcagccagtccagcggatggcatgaagtagagccaggcatgccatctccaaccactctgaagaagtctgagaagtctggtttcagcagcccctccccttcgcagacctcctccctcggaacagcattcacacagcatcaccgacctgtcataacaggaccgagagcaagcccacatgcgacgccatcgactctccactttccaacgtcacctatcatccagcagcctgggccttatttctcacacccagccatccgttaccaccctcaggagacgctgaaggagtttgtccaacttgtctgccccgatgctggtcagcaagctggacaggtggggttcctcaatcccaatggaagcagtcaaggcaaggtgcacaacccattcctccccaccccaatgttgccgccgccaccgccaccaccgatggccaggcctgtgcctctgcccatgccagacaccaagcctccaaccacatcaacagaaggcggtgcagcctcccccacctcaccgacctactcgacacccagcacctcccccgcaaaccgattcgtcagtgttggaccacgggatccaagctttgtaaatatccctcaacagacacagtcctggtacctgggataaaagttgcagcgtcccaccatcctccagacagaccacctgaccccttctcaactctgtaacatggacgcaacctcaacccggcgcagttacaacttcactgtcagtggaaggggagagacaccaactcgaatcaacttgtacatggaaacagcgaacgtcgtggtcaaacagcaaaggcccataacttttcgggattcttttttttttttaatactttagggactgtcgaattctctaaatatggtgctggaaatgcgttgggctgtgtgacatttgaagtgttccagtggtggtgtgagcagtaggtgaagcggctggtaggggatgagccttgctcacgaacttcctgttgtaacacttttgagcctggccttttcacagtatttcaagaatttgcccgcgcaggtgtgtgaccctcccggagcacttggagacacctggagaatgaaatctttcgtagtagctaagatctgtgatctgtaacttacaggacactcaagggcaatgtttttggggttttcttttttttctgtaacatattagaaaaagcaatgcagttaagttatctttcttttagtttggtttggttcagcagtcagcagttaaatacataacacaaccctcaaggacagtgaacccactcatgttgcagagcaatccaaaaagacagcaaagactactactactactctcagttcggttgtttgtttttttttttttttttttgtttttttattaagttttgaaatgctgcacttacatttaaaaaaaacattttcaacaatttcaacaatgacacaaaagttcacatggaaatggggaagatggtctgttttgacagaaactgacaggaatcaaaacaatcgaattttgaattgagtgaagtgcaatttcattggatagctaagtatctttgtaagatagagattgttgaaaattctatttttgtttttcaagtcctcccaccccaggactctaaattattggggttaaaaaaaaacagccttgcaagaaaaaggggagctatttttgctttttatgttttttattgttaaacttgtatccctttaaaaaaaaaaaccgaaggaaaatttaaaaaaaaagcaaaaaaaaaaaatacaaatctaatggtgcttttacctccaatatgttaactacattaaatgctaattaattattttctgttatcaaagcacataactcaaatgaaatcatggtatctgttaattttataagctagaaatcactataatgaattatgccaattctggaaaattttacacatgtatggcaacaccagatctatcggttttcaaacgcctcgtcgtaaccagacattgtccagaagtttcaaagacccttcgcaaaccctgaatcggctacgggaaatatatcagatcgataaggacataactgtgtgagccattcagatcaaagtacttgttaggaaaataaacaaacaaacaaaaacaaaatgttcacacacacacacaccccaaatgtcttgtatcttatgtttaaggaaaaagaaaagacaaaacggcacgagggtctgaccaccatgacaacctacagcaacaaggaccaaagctgagagaggcgtctcattcactcgtgaccttctggtggcaccgagcaggctgctctcttgcacagatggttg

SEQ ID NO: 1093 - DNA, 335 bp, Homo sapiens; identical to SEQ ID NO: 64

SEQ ID NO: 1094 - DNA, 1940 bp, Homo sapiens; identical to SEQ ID NO: 188

SEQ ID NO: 1095 - DNA, 4457 bp, Homo sapiens
gggagcttggggttccgacgtcgcggcggagggaacgagccctaaccggatcgctgaggtacaatcccgctcggtgtcgcctgaccgcgtcggctaggagaggccaggcggcccgcgggagcccagcagttcgcgcctggagccagcatagggcggccagtcgggcttcagccccagagacagtggtcacccctgattgcggcaggatggctcagtggaaccagctccagcagctggacacgcgctacctggagcagcttcatcagctgtacagcgatagcttccccatggagctgcggcagttcctggcgccttggattgagagccaagattgggcatatgcagccagcaaagagtcacacgccactctggtgtttcataacctcttgggcgagatcgaccagcagtatagccgattcctgcaggagtccaatgtcctctatcagcacaacctgcgaagaatcaagcagttcctgcagagcaggtatcttgagaagccaatggaaattgcccggattgtggcccgatgcctgtgggaagagtctcgcctcctccagacggcagccacggcagcccagcaagggggccaggccaaccaccccacagctgccgtagtgacggagaagcagcagatgctggaacagcatcttcaggatgtccggaagcgtgtgcaggatctagaacagaaaatgaaagtggtggagaatctccaggatgactttgatttcaactataaaaccctcaagagtcaaggagacatgcaggatctgaatggaaacaaccagtctgtgaccagacagaagatgcagcagctggagcagatgctcacggccctggaccagatgcggaggagcatcgtgagcgagctggcagggctcttgtcagcaatggagtacgtgcagaagacactgaccgatgaagagctggctgactggaagaggcggcagcagatagcgtgcatcggaggccctcccaacatctgcctggaccgtctggaaaactggataacttcattagcagaatctcaacttcagacccgccaacaaattaagaaactggaggagctgcagcagaaagtgtcctacaagggggaccctattgtgcagcaccggccaatgctggaggagaggatcgtggatctgttcagaaacttaatgaagagtgccttcgtggtggagcggcagccctgtatgcccatgcacccggaccggcccttagtcatcaagactggtgtccagtttaccacaaaagtcaggttgctggtcaaatttcctgagttgaattatcagcttaaaattaaagtgtgcattgataaggactctggggatgttgctgccctcagagggtctcggaaatttaacattctgggcacgaacacaaaggtgatgaacatggaggagtccaacaacggcagcctgtctgcagagttcaagcacctgaccctgagggagcagagatgtgggaatgggggccgtgccaattgtgatgcctccttgattgtcactgaggagctgcacctgatcacctttgagacagaggtgtaccaccaaggtctcaagatcgacctagagacccactccttgccagtcgtggtgatctccaacatctgtcagatgcctaatgcttgggcatcaatcctgtggtataacatgctgaccaataaccccaagaacgtgaacttcttcactaagcctccgattggaacctgggaccaagtggccgaggtgctgagctggcagttctcgtccaccaccaagcgagggctgagcatcgagcagctgaccacgctggccgagaagctcttagggcctggtgtgaactactcagggtgtcagatcacatgggctaagttttgcaaagaaaacatggccggcaagggcttctcgttctgggtctggctagacaatatcatcgaccttgtgaaaaagtatatcttggccctttggaatgaagggtacatcatgggtttcatcagcaaggagcgggagagggccatcctaagcacaaagcccccgggcaccttcctgctgcggttcagtgagagcagcaaggaaggaggggtcactttcacttgggtggaaaaggacatcagtggcaagacccagatccagtctgtagaaccatataccaagcagcagctgaacaacatgtcatttgctgaaatcatcatgggctataagatcatggacgctaccaacatcctggtatccccactggtctacctctaccctgacattcccaaggaggaggcattcggaaagtattgtcgccccgagagccaggagcaccctgaagctgacccaggtagtgctgccccttacctgaagaccaagttcatctgtgtgacaccaacgacctgcagcaataccattgacctgccgatgtccccccgcactttagattcattgatgcagtttggaaataacggggaaggcgctgagccctcagcaggagggcagtttgagtcgctcacgtttgacatggatctgacctcggagtgtgctacctccccgatgtgaggagctgaaagcggaaactgcagagtatgactgagacacctgccccatgttccaccccttaagcagccaaactcccagatcatctgaaactcccaactttgtggttccagattttttctttaatctcctacttctgctatctttgggcaatctgggtactttttaaaatagagaactgagtgagcgtgggtgatgcgctcttatgtgaggaggagggcacctcttgagtccgtgatggctgtgaaagcagagggctgggggggagcgaaaggaaacacctatgttctgtccgcctgtcctcctggtttgttgttggacaagcgcctcctggtgcccatggcatcctgctgcccctttctgtgagctgataccccaggctggggactcccggctctgcactttcaacctggttaatgtccacatagaagctaggactaagcctataggcttctctttaaattaaaaaaaaaaatactaagaattaaagggcaaaacacactgaaacagcatagcctttccatatcaaagaaaactcggttaacagccttttcggtgctttaagctgtctttaggctgatcatttatataaactctgcaatggtttcaaatcaaatctgtaaaagacatctgagaactgtggttcaaacacaaagattagagagaacctagatatcccagactcttgtcatgaactgggttttgtttacccagtatgcttgtctgttggaggggtgaggtcggccaagggcactggaaaacctttgtcatacccccctccccagcccagactctggaccctgttccagggtcatcctgccctgtgggtgccttactgggcctagggtcaacctggcttcctttcccacttgaccttgctagtggtatgtctccttcccatgtccaaaggcccctgtcctgcttacattgggaatccctgtctcagaaccttgtgtcgagagggattgccttagaggtttgaacctaactcagactacaggtcctcagcaaagctcagggagtatggtccttattctatgtgcttggttcccaggggtacctgtaaccacaggacaaaagctgactgataaaatccaggtctgcccttcatgtgagtggcgtactcccgccccccccccccccgccccgagagtgccgattgtatgctccccgttggggctcctaggtgaggtgggacagagtgcctgcccctactgtggccttcctgtcacctgcttgcctcagtcactgagcatacttgaacactgagtggttcaaggcaagcctcccctgatacaggggcatggctagattcagtgactcaaagccaccttactcagctgatctgtctgtggaattgtttttctccagttaaccagtgtctgaattaagggcagtgaggacattgtctccaagacaaactgcttgccttgaccaccccagccttctgcttcgaggcagtcattgctctcccttccctggccaggttctttagttacacaataagctgaactcataaactgaaagggtatttaggaaggcaaggcgtgggcatgttgatggcttccaatcctggggacccaggaacaaggtgagggcttctctggggcaggtgttgtacctcaggggttctgggaagtctgtatctgggttaatcacccatagtgagcccttggaacggcccacttcccctccccttggccccacttgtccccaacctcacccagccatgcctgcagtttgcttggcctcccagtacagtggcttttattctgtcctggtcactgcactcaaattccaatgtatactttctagtgtaaaaatttatattattgtgggttgttttatgttgttgtttgtttttgtatattgctgtaactactttaacatccagaaataaagattatataggaaaaaaaaaaaaaaaaaaaaaaaaaaaaa

SEQ ID NO: 1096 - DNA, 2600 bp, Homo sapiens
cgggaccgaccgcaagctggatccggacggtgacagtaccatgggatcctcatcggaaagaagagacagtgttttatggtcagacatccccaagggcccccttagtgcctaccgagcaagagcctccttcaattccaaggagctgatgctcttctgggacggccaggatgtactcgacttcaagaaaaccatcttctcaactttggagaatgaccctctcttcgcccgcccattcggggctgatctgcctctggagaaggaacgagaactgaacttccttcgctgcaagagggtctttgagtatggcttcttcaacgcagaggacatgctaaagaaccccctgaagattctagtattgatgaactgcctgggcatgtacgactggtccctggccaacaaatgtgtcctccacatgttggtttttggatctacaattatcggttctggttctgagcaccatttcaagtaccttgagaagatatataacctggagatttttggctgtttcgctctcaccgaactgagtcatgggagtaataccaaggccatgagaacaacagctcactatgatcctgctactcaggaattcatcttacattctccagatttcgaggctgccaaattttgggtgggcaacctgggcaagaccgcaactcatgcggtggtgtttgcccagctgtacacgccagatggccagtgccgagggctgcattccttcctggtgcagattcgggacccgaagaccctgcttcccatgccaggggtgatggtcggtgacatggggaagaagttgggacagaatggcctggataatggattcgccatgttccacaaagttcgaattcctcgccagaacctgctggaccggaccgggaatgtcacctctgagggacattaccacaccccctttaaggatgtccggcagcgtttgggggcatcattgggcagcctgtcctcgggacgcatctccatcattagcatttctgtggtcaacctgaagctggctgtgatcatagctatccgattctcagccacgcggcgtcagtttggacccacagataaggaagagatccctgtcctcgagtatccactgcagcaatggcgcctacttccatacctggcagctgcctatgccttggaccacttctccaagacaatcttcttggacctgatagagctacagcgtgccggcaaagtggggaccacagtgacaggcaggcagagctcgggacgggagatccacgcactagcatcagcgggcaagcccctagcctcatggacagcccagcggggaattcaggagtgccgtgaggttgttgggggacacggctatctagccatgaaccggtttggcgaactcagaaatgacaacgatccaaactgtacctatgaaggcgacaacaatgtcctgctgcagcagaccagcaactacctgctcagcctcctggagcatcctctccaagacggagctcacttcacaagccctctcaagacagtgaacttcctggaagcctaccctggaatcttgggccagaagttcatggcctccagcaaggctgactggttggactcagaagcccccctggcagcctaccgttggcttgtttgctacctgctccgagagagtcatcagagatactgtcaagagaaaaagtccagaggcagtgactttgaagcaaggaacaacagccaggtgtatggctgccggcccctggccctggccttcatggagctcactgtgatgcagcgcttccacgagcatacacacagctctagcgtgcctccatctctgcggactgtgcttggacggctcagcatgctctacggcctgtggtgcctgagccaacacacggccctgctctaccgaggtggctacatctctggggagcaaacaggaaaagcgatggaggatgccatcctgatgctgtgtgtgcagctgaaagacgatgcggtggccttggtggacgcgattgccccttctgactttgtcctgggctccccaattggcagagctgatggcgagctctataaaaacctgtgggcagctgtcctgcagcagagcggtgtgctggagcgtgcggcctggtggcctgagttcactgccaacaaatctgtggccaacaggctgaagtcccagctgtagacacagttggaggggtgtctgagcaggagcagccgatccagaggcctggacccagacaatcagacacccacgctggaagacacactaaatcctctccttgactctcgtcagcctgcgcgtacccatccccaatggggtatttgcaaggagtttgcacagtgtgtctccccgagggccttggaatttaacaaaggattttgtaatgctatctcgggggcccagataggaatgtaaaggtctgctcaggtaaactttgggatccgtggaagattttcaagatgctctcttctctctgctgctatctgcytcttttaacctggcgtggggtaaccatacgtctgtttaccggccacttgccactctgtacccatggactgtcagaatgtaatttgaagattttttatatgaaaaaaaatgttttattaagtcttcggtggcaccagaagtttccactgag

SEQ ID NO: 1097 - DNA, 1044 bp, Homo sapiens
aattatgtgccactcacgcaaccatctccacaccatgactggcctgagggctccggcgccagctccctccaccagcccggaactccggcggggctccggtcccgagattttcaccttcgaccccctcccggagcgggcggtagcgtccgccgtgcgtccgaacacttctcgcgggcaccgaaaacgcagccgacgggtgctctaccctcgagtggtccggcgccagctaccaaccgaggaacccaacattgccaagaggatcctctttctcctgctcgccatcatcttctgccagattttgatggctgaagaaggtgtgtcgcaggccctggctccggaggatgctaccagcgccatatcacctgagcccatctctgtgcccattactgcgcctcctgtcctcgagcctttgaacctgacctcggagtcctcggactatgctctggatctcaaagcttttctccagcaacacccggcggcattctaaacgcgatgggtcacagtccggaaaaaaaacccaaagaggcaccaggggtacctggtgcgcaagaacgtatcccaaactgggacttataaggcaacgctaactcagaacactaccgccaagatgccggcaccgtgggtcctggctaggctcactggtgacggacggaggtcttctcggtgtctaattaatatttatgtatttatgtatatcctcctaggtgaaggaggggtgtatgtaatatttattctaacttatgcaggggtgcgagatatgcccccttgctgtgacacagatatttattacgatttatagggtccgtgagacagagttgtgggaggattagtttagtcttggtcggggggcataggtttaggggtaacactccattttccagcacttcgactctgttgtaagactttggcagacccttgggaatacggtctgtggcctttgatgtcttcctgactggaagtcttgggtccatggattgtcagagggcggctgtctggggtcgcctagtatgttctgtgaacacgaataaacttgattgcctgtca

SEQ ID NO: 1098 - DNA, 2300 bp, Homo sapiens; identical to SEQ ID NO: 420

SEQ ID NO: 1099 - DNA, 2717 bp, Homo sapiens
cggaggagacaagatggcgttgcgagcgatgcggggaatcgtgaacggggccgcgcccgagctgcccgtgcccaccggtgggccgatggccggagctcgggagcaggcgctggcggtgagccggaactacctctcccagcctcgtctcacctacaagactgtctctggagtgaatggtccactagtgatcttagatcatgtaaagtttcccagatatgctgagattgtccacttgacattaccagatggcacaaaaagaagtgggcaagttctagaagttagtggctccaaagccgtggttcaggtatttgaaggaacatccggcatagatgccaagaaaacatcctgtgagtttactggagatattctccgcacaccagtgtctgaggatatgcttggtcgagtattcaatggatcaggaaaacccattgaccgaggtcctgtggtgttggccgaagacttccttgacatcatgggtcagccaatcaaccctcagtgtcgcatctacccagaagagatgattcagacgggcatttctgccatcgatggcatgaacagtattgcgaggggacagaaaatccccatcttttctgctgccgggttaccacacaacgagattgcagctcagatctgtcgccaggctggtttggtaaagaaatccaaagacgtggtagactacagtgaagaaaactttgccattgtgtttgctgctatgggagtaaacatggaaacagcccggttcttcaaatctgactttgaagaaaatggctcaatggacaatgtctgccttttcttgaatctggctaatgacccaactatcgagaggatcatcactcctcgcctggctctgaccaccgctgagtttctggcttaccagtgtgagaagcatgtcctggtcatcctgacagatatgagttcttacgctgaagcacttcgagaggtttcagctgccagggaagaggttcctggtcggcgaggcttccccggctacatgtatacggatttagccaccatctatgaacgcgctgggcgagtggaaggtagaaatggctctattacccaaatccctattctcaccatgcccaatgatgatatcactcatcctatccctgacttgactgggtatattactgagggccagatctatgtggacagacagctgcacaacagacagatttaccctcctattaatgtgctgccctcactctctcggttaatgaagtcagctattggagaaggaatgaccaggaaggatcatgctgatgtgtctaaccagttgtacgcatgctatgctatcggtaaggatgtgcaagccatgaaagctgtggtgggagaagaagccctgacctcagatgacctcctttacttggaatttctgcagaagtttgagaaaaacttcattactcagggtccctatgaaaatcgaactgtctatgagactttggacattggctggcagttgcttcgaatcttccccaaagaaatgctgaagaggatccctcagagtaccctgagcgaattttaccctcgagactctgcaaagcactagctgctgctgcttgtgcggctcgaccctcttgtgaagtgctggttctgtttgctgattccttttgcactcctccatcccacctgtgtgtgggagttcacctgttaccctgtaattaaagacaaaggctaggtaactgttgtgccagtgttcagcgtttaaactgctaaccgattgagagatccccgctcagaacctcaccttctgtgctgtctttaaagtggcggaggtgaggcttgcttaccggtgtatctatttgtacatagtggagagctagttgcgaataatgtcttgtttgggtctcccaaaccctacctctcaactcccttaagagtatcactgttttgaagttaaaatgcttcagtctcaaatttaggggcaaggtggagactggaagaattctcctttcagaagaaccatgaggctcgtggctgagcctccctctggagtactagtgtacctgtgggtctgtcctctgctctgtgcagatgggttttactgtctgcttgagttttcttaggaaaagagttctgttctgccagtgctgcgagttgggattcctgtgtggccatctttctctttgaggcctaaagagtcaggcaccactgtgcagcggcattctcctgcaggggtggcgtgccttgtgctgatgacccccactgggctgcagtcataggagaactgagacttggaaaatgctggggcacagttaagaaaacctacatcccaccctcatcttgtgtttatggtggcttaggtctctgcattgccctccagatcctgaggtggggcatggagatgacttgccttaggtttgtggatgctttaaactctgctcagtcctcaagctttctgactcagctctcccttttctgggtgatcttgtggcacgtgtagcaatgtttctttcattcctgtcccttcctggcttgagctcttagctgtattctgtgtgcctctgccgtgtctgctgtttgggtctctgtgctgtgtgttctcaggtgcagccataacttccccactccgagcattccaccttccagttgtttttctctgaggggatgggggggcggtcagcatgattatattttaatgtagaaaatgtgacatctcgttataaatgaaaataaatgttaaattaaatggaaaaaaaaaaaaaaaaaaaaaaaaa

SEQ ID NO: 1100 - DNA, 1828 bp, Homo sapiens
gtggcactccgcagcactacccggagacagctaacagtgcagcccgagtgatctgggaagccgttctcagtgaccgacttttctagtcctgttccacgcgaccagcagagacatgaattactcaaggttcctcactgcaacgagcctggccagaaagacatcccctatcagagctacagtggagataatgagtagagcacccaaagacatcatctccctggctcctggatctccgaacccgaaagtgttcccctttaagtcagctgtcttcactgtggagaacggaagcaccatccggtttgaaggagagatgtttcaaagggccctccaatattcctcaagctatggaattccagaacttctgtcctggctaaaacagttgcaaataaaattgcataatcctccgactgtcaactactcacccaacgaaggacagatggacctctgcatcacatctggctgtcaagacggtctctgtaaggtgtttgaaatgctcatcaatcctggagacactgttctggtcaatgaaccactgtattcaggagccctttttgcaatgaaaccactgggctgcaattttattagtgtccccagtgatgactgtgggattattccagagggtctcaaaaaagtactttcccagtggaaaccagaagattccaaggatcccacaaaaaggactccaaaatttctgtatactattccgaatggcaacaaccctacaggcaactcgttgactggtgaccgcaagaaagaaatctatgagcttgcaagaaaatatgacttcctcataatagaagacgatccttactattttctccagttcaccaagccttgggaaccaacctttctctccatggatgttgatgggagagttatcagagctgactccctttcaaaagttatctcctcagggctgagagtggggtttataactggccccaagtccttgatacagaggattgttctccacacacaaatctcatcactgcatccctgtactttatcacagctcatgatatcggagcttctataccagtggggagaagagggtttcctggcccatgttgacagagctattgatttctacaagaaccagagggattttatattggcagctgcagacaagtggttacgtggtttggcagagtggcatgttcccaaagctggcatgtttctatggattaaagttaacggaatctctgatgcaaaaaaactaattgaagaaaaggctattgaaagagagatcttgttagttcctggaaatagtttcttcgtcgataattcagccccctcctccttcttcagagcatccttctctcaggttactccagcgcagatggacttagtcttccagagattggcccaactcataaaagacgtttcataaagaaatcaaactcagcattgaacttataattttaaaataaatttcctatactttgctgaagaaatggctgacaggatggatccagtttgtgaaatatctgtggcaatttcactgaacaactttgaagccccttaaaatccaccgcattgccaaaataactttctgatatacttttgccctttgattaattatgaactaacaaaacatcaaatttcattgttaaagacctctgtagctgcttaataatgtccaataaatttttttgagcctaacatagactaactaacatagtaaattgcaagggaattagttaaaatggcctataatatgcaggtttttttctactttaaggaaatttcatgagcatttactgcaaaaattgttgtaatttgacaattataaattactttgtaaccgaaaaaaaaaaaaaaaaaaaaa

SEQ ID NO: 1101 - protein, 472 aa, Homo sapiens
MGCDRNCGLITGAVIGAVLAVFGGILMPVGDLLIEKTIKREVVLEEGTIAFKNWVKTGTTVYRQFWIFDVQNPEEVAKNSSKIKVKQRGPYTYRVRYLAKENITQDPKDSTVSFVQPNGAIFEPSLSVGTENDNFTVLNLAVAAAPHIYTNSFVQGVLNSLIKKSKSSMFQTRSLKELLWGYKDPFLSLVPYPISTTVGVFYPYNNTVDGVYKVFNGKDNISKVAIIDTYKGKRNLSYWESYCDMINGTDAASFPPFVEKSRTLRFFSSDICRSIYAVFGSEVNLKGIPVYRFVLPANAFASPLQNPDNHCFCTEKVISNNCTSYGVLDIGKCKEGKPVYISLPHFLHASPDVSEPIEGLNPNEDEHRTYLDVEPITGFTLQFAKRLQVNILVKPARKIEALKNLKRPYIVPILWLNETGTIGDEKAEMFRNQVTGKIKLLGLVEMVLLGVGVVMFVAFMISYCACRSKNGK

SEQ ID NO: 1102 - protein, 239 aa, Homo sapiens
MAPNALAPEPEHPEGIRAVLLGPPGAGKGTQAPKLAENFCVCHLATGDMLRAMVASGSELGKKLKATMDAGKLVSDEMVVELIEKNLETPSCKNGFLLDGFPRTVKQAEMLDDLMDKRKEKLDSVIEFSIQDSLLIRRITGRLIHPKSGRSYHEEFNPPKEAMKDDITGEPLIRRSDDNEKALKTRLEAYHTQTTPLVEYYRKRGIHCAIDASQTPDVVFASILAAFSKATCKDLVMFV

SEQ ID NO: 1103 - protein, 263 aa, Homo sapiens [sequence omitted]

SEQ ID NO: 1104 - protein, 545 aa, Homo sapiens
MMGHRPVLVLSQNTKRESGRKVQSGNINAAKTIADIIRTCLGPKSMMKMLLDPMGGIVMTNDGNAILREIQVQHPAAKSMIEISRTQDEEVGDGTTSVIILAGEMLSVAEHFLEQQMHPTVVISAYRMALDDMVSTLKKISTPVDVNNRDMMLNIINSSITTKVISRWSSLACNIALDAVKTVQFEENGRKEIDIKKYARVEKIPGGIIEDSCVLRGVMINKDVTHPRMRRYIKNPRIVLLDSSLEYKKGESQTDIEITREEDFTRILQMEEEYIQQLCEDIIQLKPDVVITEKGISDLAQHYLMRANVTAIRRVRKTDNNRIARACGARIVSRPEELREDDVGTGAGLLEIKKIGDEYFTFITDCKDPKACTILLRGASKEILSEVERNLQDAMQVCRNVLLDPQLVPGGGASEMAVAHALTEKSKAMTGVEQWPYRAVAQALEVIPRTLIQNCGASTIRLLTSLRAKHTQENCETWGVNGETGTLVDMKELGIWEPLAVKLQTYKTAVETAVLLLRIDDIVSGHKKKGDDQNRQTGAPDAGQE

SEQ ID NO: 1105 - protein, 504 aa, Homo sapiens
MASKLTPLTLLLLLLAGDRAFSDSEVTSHSSQDPLVVQEGSRDSVPERDGSRSPIEHTGQSSTWPTTSGSTKISNDTMDQVANESFIQHVQPAAQLPEDSPSQSPVNSSSPPSTASAPPTQAPTEPLCPEPLAWCSDSDRDSSEATLSEALTDFSVKLYHAFSATKKAETNMAFSPFSIASLLTQVLLGAGDSTKSNLEDILSYPKDFACVHQTLKAFSSKGVTSVSQIFHSPDLAIRDTYVNASLSLYGSSPRVLGPDGDANLKLINTWVAENTNHKINELLDSLPSDTRLVLLNAVYLSAKWKKTFEQKKMMASFLYKNSMIKVPMLSSKKYPLALFNDQTLKAKVGQLQLSHNLSFVIMVPQSPTHQLEDMEKALNPTVFKAILKKLELSKFQPTYVMMPRIKVKSSQDMLSIMEKLEFFDFTYDLNLCGLTEDPDLQVSSMKHETVLELTETGVEAAAASTISVARNLLIFEVQQPFLFLLWDQRHKFPVFMGRVYDPRA

SEQ ID NO: 1106 - protein, 330 aa, Homo sapiens
MHHQSVLHSGYFHPLLRAWQTTPSTVSATNLIYPIFVTDVPDDVQPIASLPGVARYGVNQLEEMLRPLVEAGLRCVLIFGVPSRVPKDEQGSAADSEDSPTIEAVRLLRKTFPTLLVACDVCLCPYTSHGHCGLLSENGAFLAEESRQRLAEVALAYAKAGCQVVAPSDMMDGRVEAIKAALLKHGLGNRVSVMSYSAKFASCFYGPFRDAAQSSPAFGDRRCYQLPPGARGLALRAVARDIQEGADILMVKPGLPYLDMVQEVKDKHPELPLAVYQVSGEFAMLWHGAKAGAFDLRTAVLESMTAFRRAGADIIITYFAPQLLKWLKEE

SEQ ID NO: 1107 - protein, 207 aa, Homo sapiens
MTMDGDSSTTDASQLGISADYIGGSHYVIQPHDDTEDSMNDHEDTNGSKESFREQDIYLPIANVARIMKNAIPQTGKIAKDAKECVQECVSEFISFITSEASERCHQEKRKTINGEDILFAMSTLGFDSYVEPLKLYLQKFREAMKGEKGIGGAVSATDGLSEELTEEAFTNQLPAGLITADGQQQNVMVYTTSYQQISGVQQIQFS

SEQ ID NO: 1108 - protein, 1059 aa, Homo sapiens
MKFLLLSALLFLHSSLAWTREKHYYIGITEAVWDYASGSEEKELISVDTEQSNFYLRNGPDRIGRKYKKALYSEYTDGTFTKTIDKPAWLGFLGPVIKAEVGDKVSVHVKNFASRPYTFHAHGVTYTKANEGAIYPDNTTDFQRADDKLFPGQQYLYVLRANEPSPGEGDSNCVTRIYHSHVDAPKDIASGLIGPLILCKKGSLHKEKEENIDQEFVLMFSVVDENLSWYLEDNIKTFCSEPEKVDKDNEDFQESNRMYSINGYTFGSLPGLSMCAEDRVKWYLFGMGNEVDVHSELFHGQALTSKNYHTDIINLFPATLIDVSMVAQNPGVWMLSCQNLNHLKAGLQAFFQVRDCNKPSPDDDIQDRHVRHYYIAAEETIWDYAPSGTDTFTGENFTSLGSDSRVFFEQGATRIGGSYKKLVYREYTDDSFTNRKERGPDEEHLGILGPVIWAEVGDIIRVTFHNKGQFPLSIQPMGVRFTKENEGTYYGPDGRSSKQASHVAPKETFTYEWTVPKEMGPTYADPVCLSKMYYSGVDLTKDIFTGLIGPMKICKKGSLLADGRQKDVDKEFYLFATVFDENESLLLDDNIRMFTTAPENVDKEDEDFQESNKMHSMNGFMYGNLPGLNMCLGESIVWYLFSAGNEADVHGIYFSGNTYLSKGERRDTANLFPHKSLTLLMTPDTEGSFDVECLTTDHYTGGMKQKYTVNQCKGQFEDVTLYQGERTYYIAAVEVEWDYSPSRDWEMELHHLQEQNVSNAFLDKEEFFIGSKYKKVVYREFTDSTFREQVKRRAEEEHLGMLGPLIHADVGAKVKVVFKNMATRPYSIHAHGVKTKSSTVAPTLPGEVRTYIWQIPERSGAGTEDSPCIPWAYYSTVDRVKDLYSGLIGPLIVCRKSYVKVFNPKKKMEFSLLFLVFDENESWYLDDNINTYPDHPEKDNKDNEEFIESNKMHAINGKMFGNLQGLTMHVGDEVNWYVMAMGNEIDLHTVHFHGHSFQYKHRGIHSSDVFDFFPGTYQTLEMFPQTPGTWLLHCHVTDHIHAGMVTTYTVLPNQETKSG

SEQ ID NO: 1109 - protein, 355 aa, Homo sapiens
MAKLLGLTLVGLVLALYKNHRSSYQTRLNAFREVTPVDLPNCTLVKGIEAGAEDLEILPNGLTFFSTGLKYPGIKSFDPSKPGKILLMDLNEKEPAVSELAIMGNTLDMSSFNPHGISTFIDEDNTVYLLVVSHPDSSSTVEVFKFQEEERSLLHLKTITHELLPSINDIAAVGPESFYATNDHYFADPYLRSWEMYLGLSWSNVVYYSPDKVRVVADGFDFANGIGISLDGKYVYIAELLAHKIHVYEKHANWTLTPLKVLSFDTLVDNISVDPVTGDLWVGCHPNGMRIFFYDSENPPGSEVLRIQSILSEDPKVTVVYAENGTVLQGTTVAAVYKGKLLIGTVFHRALCCDL

SEQ ID NO: 1110 - protein, 285 aa, Homo sapiens
MMSDYNWFEGIPFPAISYQREILEDIRNKFVVKEEDLLILTYPKSGTNWLNEIVCLIQTKGDPKWIQTVPIWDRSPWIETEIGYPAIINKEGPRLITSHLPIHLFSKSFFSSKAKAIYLMRNPRDILVSGYFFWGNTNLVKNPGSLGTYFEWFLQGNVLFGSWFEHVRGWLSMREWDNFLVLYYEDMKKDTKGTIKKICDFLGKNLGPDELDLVLKYSSFQAMKENNMSNYSLIKEDRVTNGLKLMRKGTTGDWKNHFTVAQAEAFDKVFQEKMAGFPPGMFPWE

SEQ ID NO: 1111 - protein, 126 aa, Homo sapiens
MRARRGFILLLLLAVLCSTGVSLRCYNCLDPVSSCKTNSTCSPNLDACLVAVSGKQVYQQCWRFSDCNAKFILSRLEIANVQYRCCQADLCNKSFEDKPNNGAISLLGKTALLVTSVLAAILKPCF

SEQ ID NO: 1112 - protein, 285 aa, Homo sapiens; identical to SEQ ID NO: 1110

SEQ ID NO: 1113 - protein, 690 aa, Homo sapiens
MFCRKFKDLKITGECPFSLLAPGQVPTEPIEEVAGVSESCQATLPTCQEFAENAEGSHPQRKTSRNRVYLHTLAESIGKLIFPEFERLNLALQRTLAKHKIKENRNSSEKEDLERIIAEEAIAAGVPVEVLKDSLGEELFKICYEEDEHILGVVGGTLKDFLNSFSTLLKQSSHCQEAERRGRLEDASILCLDKDQDFLNVYYFFPKRTTALLLPGIIKAAARILYESHVEVSLMPPCFRSECTEFVNQPYLLYSVHVKSTKPSLSPGKPQSSLVIPTSLFCKTFPFHFMLDRDLAILQLGNGIRRLVNKRDFQGKPNFEEFFEILTPKINQTFSGIMTMLNMQFVIRVRRWDNLVKKSSRVMDLKGQMIYIVESSAILFLGSPCVDRLEDFTGRGLYLSDIPIHNALRDVVLIGEQARAQDGLKKRLGKLKATLEHAHQALEEEKKKTVDLLCSIFPSEVAQQLWQGQIVQAKKFNEVTMLFSDIVGFTAICSQCSPLQVITMLNALYTRFDQQCGELDVYKVETIGDAYCVAGGLHRESDTHAVQIALMALKMMELSNEVMSPHGEPIKMRIGLHSGSVFAGVVGVKMPRYCLFGNNVTLANKFESCSVPRKINVSPTTYRLLKDCPGFVFTPRSREELPPNFPSDIPGICHFLDAYQHQGPNSKPWFQQKDAEDGNANFLGKASGVD

SEQ ID NO: 1114 - protein, 719 aa, Homo sapiens
MALKDYAIEKEKVKKFLQEFYYDDELGKKQFKYGTQLVHLAHREQVALYVDLDDVAEDDPELVDSICENAKRYSRLFADVVQELLPEYKEKEVVNKDVLDVYIEHRLMMEQRSRDPGAVRNPQNQYPSELMRRFELYFQGPSSSKPRVIREVRADSVGKLLTVRGIVTRVSEVKPRMVVATYTCDQCGAETYQPIQSPTFMPLIMCPSQECQTNRSGGRLYLQTRGSKFIKFQEMKIQEHSDQVPVGNIPRSITVVLEGENTRIAQPGDHVSVTGIFLPVLRTGFQQMAQGLLSETYLEAHRVVKMTKSEDDVSGAGELSAEELKQIAEEDFYEKLAASIAPEIYGHEDVKKALLLLLVGGVDQSPQGMKIRGNIHICLMGDPGVAKSQLLSYIDRLAPRSQYTTGRGSSGVGLTAAVLRDSVSGELTLEGGALVLADQGVCCIDEFDKMAEADRTAIHEVMEQQTISIAKAGILTTLNARCSILAAANPAYGRYNPRRSLEQNIQLPAALLSRFDLLWLIQDRPDRDNDLRLAQHITYVHQHSRQPPAQFEPLDMKLMRRYIAMCRERQPTVPDSLADYITAAYVEMRREARASKDATYTSARTLLAILRLSTALARLRMVDIVEKEDVNEAIRLMEMSKDSLLGEKGQTARTQRPADVIFATVRELVSGGRSVRFSEAEQRCISRGFTPAQFQAALDEYEELNVWQVNTSRTRITFV

SEQ ID NO: 1115 - protein, 573 aa, Homo sapiens
MLRLPTVLRQMRPVSRALAPHLTRAYAKDVKFGADARALMLQGVDLLADAVAVTMGPKGRTVIIEQSWGSPKVTKDGVTVAKSIDLKDKYKNIGAKLVQDVANNTNEEAGDGTTTATVLARSIAKEGFEKISKGANPVEIRRGVMLAVDAVIAELKKQSKPVTTPEEIAQVATISANGDKDIGNIISDAMKKVGRKGVITVKDGKTLNDELEIIEGMKFDRGYISPYFINTSKGQKCEFQDAYVLLSEKKISSVQSIVPALEIANAHRKPLVIIAEDVDGEALSTLVLNRLKVGLQVVAVKAPGFGDNRKNQLKDMAIATGGAVFGEEGLNLNLEDVQAHDLGKVGEVIVTKDDAMLLKGKGDKAHIEKRIQEITEQLDITTSEYEKEKLNERLAKLSDGVAVLKVGGTSDVEVNEKKDRVTDALNATRAAVEEGIVLGGGCALLRCIPALDSLKPANEDQKIGIEIIKRALKIPAMTIAKNAGVEGSLIVEKILQSSSEVGYDAMLGDFVNMVEKGIIDPTKVVRTALLDAAGVAPLLTTAEAVVTEIPKEEKDPGMGAMGGMGGGMGGGMF

SEQ ID NO: 1116 - protein, 79 aa, Homo sapiens
MKVAIIFLLSALALLNLAGNTTAKVIGKKANCPNTLIGCPRDYDPVCGTDGKTYANECILCFENRKFGTSIRIQRRGLC

SEQ ID NO: 1117 - protein, 248 aa, Homo sapiens
MAGSTTIEAVKRKIQVLQQQADDAEERAERLQREVEGERRAREQAEAEVASLNRRIQLVEEELDRAQERLATALQKLEEAEKVADESERGMKVIENRALKDEEKMELQEIQLKEAKHIAEEADRKYEEVARKLVIIEGDLERTEERAELAESRCREMDEQIRLMDQNLKCLSAAEEKYSQKEDKYEEEIKILTDKLKEAETRAEFAERSVAKLEKTIDDLEDKLKCTKEEHLCTQRMLDQTLLDLNEM

SEQ ID NO: 1118 - protein, 286 aa, Homo sapiens
MAEARTSRWYFGGLASCGAACCTHPLDLLKVHLQTQQEVKLRMTGMALQVVRTDGFLALYNGLSASLCRQMTYSLTRFAIYETMRDYMTKDSQGPLPFYSKVLLGGISGLTGGFVGTPADLVNVRMQNDMKLPLSQRRNYSHALDGLYRVAREEGLKKLFSGATMASSRGALVTVGQLSCYDQAKQLVLSTGYLSDNIFTHFLSSFIAGGCATFLCQPLDVLKTRLMNSKGEYQGVFHCAVETAKLGPQAFFKGLVPAGVRLVPHTVLTFMFLEQLRKHFGIKVAT

SEQ ID NO: 1119 - protein, 198 aa, Homo sapiens
MADQRQRSLSTSGESLYHVLGLDKNATSDDIKKSYRKLALKYHPDKNPDNPEAADKFKEINNAHAILTDATKRNIYDKYGSLGLYVAEQFGEENVNTYFVLSSWWAKALFVVCGLLTCCYCCCCLCCCFNCCCGKCKPKAPEGEETEFYVSPEDLEAQLQSDEREATDTPIVIQPASATETTQLTADSHPSYHTDGFN

SEQ ID NO: 1120 - protein, 418 aa, Homo sapiens
MQTLVLLLWTGALLGHGSSQNVPDSSQDSPAPDSTGEPVVEEDDPFFKAPVNKLAAAVSNFGYDLYRLRSGAVSTGNILLSPLSVATALSALSLGAEQRTESVIHRALYYDLINNPDIHSTYKELLASVTAPEKNFKSASRIVFERKLRVKSSFVAPLEKSYGTRPRILTGNPRIDLQEINNWVQAQMKGKIARSTREMPSALSILLLGVAYFKGQWATKFDSRKTTLQDFHLDEDRTVRVPMMSDPKAILRYGLDSDLNCKIAQLPLTGSMSIIFFLPLTVTQNLTMIEESLTSEFVHDIDRELKTIQAVLTVPKLKLSYEGDVTNSLQDMKLQSLFESPDFSKITGKPVKLTQVEHRAAFEWNEEGAGTSSNPDLQPVRLTFPLDYHLNRPFIFVLRDTDTGALLFIGRILDPSST

SEQ ID NO: 1121 - protein, 496 aa, Homo sapiens
MADESETAVKLPAPSLPLMMEGNGNGHEHCSDCENEEDISHNRGGLSPANDTGAKKKKKKQKKKKEKGNDMDSTQDQPVKMNSLPAERIQEIQKAIELFSVGQGPAKTMEEASKRSYQFWDTQPVPKLGEVVNTHGPVEPDKDNIRQEPYTLPQGFTWDALDLGDRGVLKELYTLLNENYVEDDDNMFRFDYSPEFLLWALRPPGWLPQWHCGVRVVSSRKLVGFISAIPANIHIYDTEKKMVEINFLCVHKKLRSKRVAPVLIREITRRVHLEGIFQAVYTAGVVLPKPVGTCRYWHRSLNPRKLIEVKFSHLSRNMTMQRTMKLYRLPETPKTAGLRPMEKKDIPVVHQLLSRYLKQFNLTPVMNQEEVEHWFYPQENIIDTFVVENANGEVTDFLSFYTLPSTIMNHPTHKSLKAAYSFYNVHTQTPLLDLMSDALVLAKMKGFDVFNALDLMENKTFLEKLKFGIGDGNLQYYLYNWKCPSMGAEKVGLVLQ

SEQ ID NO: 1122 - protein, 437 aa, Homo sapiens
MAAGTLYTYPENWRAFKALIAAQYSGAQIRVLSAPPHFHFGQTNRTPEFLRKFPAGKVPAFEGDDGFCVFESNAIAYYVSNEELRGSTPEAAAQVVQWVSFADSDIVPPASTWVFPTLGIMHHNKQATENAKEEVKRILGLLDTHLKTRTFLVGERVTLADITVVCTLLWLYKQVLEPSFRQAFPNTNRWFLTCINQPQFRAILGEVKLCEKMAQFDAKKFAESQPKKDTPRKEKGSREEKQKPQTERKEEKKAAAPAPEEEMDECEQALAAEPKAKDPFAHLPKSTFVLDEFKRKYSNEDTLSVALPYFWEHFDKDGWSLWYAEYRFPEELTQTFMSCNLITGMFQRLDKLRKNAFASVILFGTNNSSSISGVWVFRGQDLAFPLSPDWQVDYESYTWRKLDPGSEETQTLVREYFSWEGAFQHVGKAVNQGKIFK

SEQ ID NO: 1123 - protein, 393 aa, Homo sapiens
MTTYSNKGPKPERGRFLHFHSVTFWVGNAKQAASFYCNKMGFEPLAYKGLETGSREVVSHVIKQGKIVFVLCSALNPWNKEMGDHLVKHGDGVKDIAFEVEDCEHIVQKARERGAKIVREPWVEEDKFGKVKFAVLQTYGDTTHTLVEKINYTGRFLPGFEAPTYKDTLLPKLPSCNLEIIDHIVGNQPDQEMESASEWYLKNLQFHRFWSVDDTQVHTEYSSLRSIVVANYEESIKMPINEPAPGRKKSQIQEYVDYNGGAGVQHIALRTEDIITTIRHLRERGMEFLAVPSSYYRLLRENLKTSKIQVKENMDVLEELKILVDYDEKGYLLQIFTKPMQDRPTLFLEVIQRHNHQGFGAGNFNSLFKAFEEEQALRGNLTDLETNGVRSGM

SEQ ID NO: 1124 - protein, 393 aa, Homo sapiens; identical to SEQ ID NO: 1123

SEQ ID NO: 1125 - protein, 782 aa, Homo sapiens
MLSLRVACLILSLASTVWTADTGTTSEFIEAGGDIRGPRIVERQPSQCKETDWPFCSDEDWNHKCPSGCRMKGLIDEANQDFTNRINKLKNSLFDFQKNNKDSNSLTRNIMEYLRGDFANANNFDNTFGQVSEDLRRRIQILKRKVIEKAQQIQVLQKDVRDQLIDMKRLEVDIDIKIRSCKGSCSRSVSREINLKDYEGQQKQLEQVIAKDLLPAKDRQYLPAIKMSPVPDLVPGSFKSQLQEGPPEWKALTEMRQMRMELERPGKDGASRGDLPGDSRGDSATRGPGSKIENPMTPGHGGSGYWRPGSSGSGSDGNWGSGTTGSDDTGTWGAGSSRPSSGSGNLKPSNPDWGEFSEFGGSSSPATRKEYHTGKLVTSKGDKELLIGNEKVTSTGTSTTRRSCSKTITKTVLGNDGHREVVKEVVTSDDGSDCGDGMDLGLTHSFSGRLDELSRMHPELGSFYDSRFGSLTSNFKEFGSKTSDSDIFTDIENPSSHVPEFSSSSKTSTVRKQVTKSYKMADEAASEAHQEGDTRTTKRGRARTMRDCDDVLQTHPSGAQNGIFSIKLPGSSKIFSVYCDQETSLGGWLLIQQRMDGSLNFNRTWQDYKRGFGSLNDKGEGEFWLGNDYLHLLTLRGSVLRVELEDWAGKEAYAEYHFRVGSEAEGYALQVSSYQGTAGDALMEGSVEEGTEYTSHSNMQFSTFDRDADQWEENCAEVYGGGWWYNSCQAANLNGIYYPGGTYDPRNNSPYEIENGVLWVPFRGADYSLWAVRMKIRPLVGQ

SEQ ID NO: 1126 - protein, 410 aa, Homo sapiens
MWAFPELPLPLPLLVNLIGSLLGFVATVTLIPAFRSHFIAARLCGQDLNKLSRQQIPESQGVISGAVFLIILFCFIPFPFLNCFVEEQCKAFPHHEFVALIGALLAICCMIFLGFADDVLNLRWRHKLLLPTAASLPLLMVYFTNFGNTTIVVPKPFRWILGLHLDLGILYYVYMGLLAVFCTNAINILAGINGLEAGQSLVISASIIVFNLVELEGDYRDDHVFSLYFMMPFFFTTLGLLYHNWYPSQVFVGDTFCYFAGMTFAVVGILGHFSKTMLLFFMPQVFNFLYSLPQLFQIIPCPRHRMPRLNTKTGKLEMSYSKFKTKSLSFLGTFILKVAESLRLVTVHRGESEDGAFTECNNMTLINLLLKVFGPTHERNLTLFLLLLQVLSSAVTFSIRYQLVRLFYDV

SEQ ID NO: 1127 - protein, 344 aa, Homo sapiens
MCTKMEQPFYHDDSYAAAGYGRSPGSLSLHDYKLLKPTLALNLADPYRGLKGPGARGPGPEGSGAGSYFSGQGSDTGASLKLASTELERLIVPNSNGVITTTPTPPGQYFYPRGGGSGGGTGGGVTEEQEGFADGFVKALDDLHKMNHVTPPNVSLGASGGPQAGPGGVYAGPEPPPVYTNLSSYSPASAPSGGSGTAVGTGSSYPTATISYLPHAPPFAGGHPAQLGLSRGASAFKEEPQTVPEARSRDATPPVSPINMEDQERIKVERKRLRNRLAATKCRKRKLERIARLEDKVKTLKAENAGLSSTAGLLREQVAQLKQKVMTHVSNGCQLLLGVKGHAF

SEQ ID NO: 1128 - protein, 179 aa, Homo sapiens
MKFKPNQTRTYDREGFKKRAACLCFRSEQEDEVLLVSSSRYPDQWIVPGGGVEPEEEPGGAAAREVYEEAGVKGKLGRLLGIFENQDRKHRTYVYVLTVTEILEDWEDSVNIGRKREWFKVEDAIKVLQCHKPVHAEYLERLKLGCSPTNGNSTVPSLPDNNALFVTAAPPSGVPSSIR

SEQ ID NO: 1129 - protein, 491 aa, Homo sapiens
MNAAAEAEFNILLATDSYKVTHYKQYPPNTSKVYSYFECREKKTENSKVRKVKYEETVFYGLQYILNKYLKGKVVTKEKIQEAKEVYREHFQDDVFNERGWNYILEKYDGHLPIEVKAVPEGSVIPRGNVLFTVENTDPECYWLTNWIETILVQSWYPITVATNSREQKKILAKYLLETSGNLDGLEYKLHDFGYRGVSSQETAGIGASAHLVNFKGTDTVAGIALIKKYYGTKDPVPGYSVPAAEHSTITAWGKDHEKDAFEHIVTQFSSVPVSVVSDSYDIYNACEKIWGEDLRHLIVSRSTEAPLIIRPDSGNPLDTVLKVLDILGKKFPVSENSKGYKLLPPYLRVIQGDGVDINTLQEIVEGMKQKKWSIENVSFGSGGALLQKLTRDLLNCSFKCSYVVTNGLGVNVFKDPVADPNKRSKKGRLSLHRTPAGTFVTLEEGKGDLEEYGHDLLHTVFKNGKVTKSYSFDEVRKNAQLNMEQDVAPH

SEQ ID NO: 1130 - protein, 208 aa, Homo sapiens
MLHGTTTLAFKFQHGVIVAADSRATAGPYIASQTVKKVIEINPYLLGTMAGGAADCSFWERLLARQCRIYELRNKERISVAAASKLLANMVYQYKGMGLSMGTMICGWDKRGPGLYYVDSEGNRISGTAFSVGSGSVYAFGVMDRGYSYDLQVEEAYDLARRAIYQATYRDAYSGGAVNLYHVREDGWIRVSSDNVADLHDKYTSSIP

SEQ ID NO: 1131 - protein, 93 aa, Homo sapiens
MSTNTDLPLSSYDEGQGSKFIRKARETPFVPIGMAGFAAIVAYGLYKLKSRGNTKMSIHLIHMRVAAQGFVVGAMTLGMGYSMYQEFWAKRKP

SEQ ID NO: 1132 - protein, 1009 aa, Homo sapiens
MGTGSLAPGVRAGGGNTGWLWMSSCNLGLPVLSISFLIWLLLAAPGAQAAGYKTCPTTKPGMLNVHLLPHTHDDVGWLKTVDQYYYGIMSDVQHASVQYILDSVIYSLLNDPTRRFIYVEMAFFSRWWKQQTNVTQDAVRNLVRQGRLEFVNGGWVMNDEAATHYGAIVDQMTLGLRFLQDTFGSDGLPRVAWHIDPFGHSREQASLFAQMGFDGFFLGRIDYQDKFNRKRKLKMEELWRASASLKPPAADLFTGVLPNNYNPPKDLCWDVLCTDPPVVDDPTSPEFNANKLVDYFLNLASSQKKYYRTNHTVMTMGSDFQYENANMWFKNMDKLIRLVNEQQANGSKVHVLYSTPSCYLWELNKANLTWTVKEDDFFPYADGPHMFWTGYFSSRPALKRYERLSYNFLQVCNQLEALVGPEAKVGPYGSGDSAPLNEAMAVLQHHDAVTGTARQNVVNDYAKQLAAGWGPCEVLVSNALARLSLYKQNFSFCREINISICPASQTSEHFRVIIYNPVGRKVDLMVRLPVSEGIFLVKDPNDRRISSNVVMVPSAYSKTYQWELLFPASVPALGFSIYSVNKMSGHNHQAHNLTARPKKSKSRVLVIENKYIRATFDSDTGLLRKIENLEQNISLPVRQGFFWYNASAGDEESPQASGAYIFRPSHRKPLPVSHWAQVTLVKTNLVQEVHQNFSAWCSQVIRLYEGQRHLELEWTVGPIPVKDDWGKEVISRFNTPMRTRGQFFTDSNGREILKRRDDFRPTWTLNQTEPVAGNYYPVNTRIYITDGHMQLTVLTDRSQGGSSLLDGSLELMVHRRLLVDDERGVAEPLLETDTGDKVRGRHLVILSSVSDAAARHRLLAEQEVLAPQVVLAHGGSSPYHSQAPKMQFSALRRELPPQVHLLTLARWGPKMLLLRLEHQFAVKEDSNRNLSSPVTLNLQNLFKTFTINYLQETTLAANQPLSRVSRLKWMTDTGPISYPAPSRLDPTSITLQPMQIRTFLASVQWQRLI

SEQ ID NO: 1133 - protein, 186 aa, Homo sapiens
MGTPNDQAVLQAILNPNTPFGDVVGLDLEETEEGDEDGVFPQAQLEQSKALELQGVRAAEAGDLHTALERFGKAISLLPERASAYNNRAQARRLQGDVAGALEDLERAVTLSGGRGRAARQSFVQRGLLARFQGRDDDARRDFEQAARLGSSFARRQLVLLNPYAALCNRMLADMMGQLSAPSNGR

SEQ ID NO: 1134 - protein, 107 aa, Homo sapiens
MTKSCRIEASTLGVWGMRVLQTRGFGSDSSESMDSGAGSIREAGGAFGKREKAEEDRYFREKTREQLAALKKHHEDEIDHHSKEIERLQKQIERHKKKIKYLKNSEH

SEQ ID NO: 1135 - protein, 530 aa, Homo sapiens
MDGIVPDIAVGTKRGSDELFSTCVSNGPFIMSSSASAANGNDSKKFKGDNRSTGVPSRVIHVRKLPSDVTEGEVISLGLPFGKVTNLLMLKGKNQAFIEMSTEEAANTMVNYYTSVAPVLRGQPIYIQFSNHKELKTDSSPNQARAQAALQAVNSVQSGNLALAASAAAVDAGMAMAGQSPVLRIIVENLFYPVTLDVLHQIFSKFGTVLKIITFTKNNQFQALLQYADPVSAQHAKLSLDGQNIYNACCTLRIDFSKLTSLNVKYNNDKSRDYTRPDLPSGDSQPSLDQTMAAAFGLSVPNVHGALAPLAIPSAAAAAAAAGRIAIPGLAGAGNSVLLVSNLNPERVTPQSLFILFGVYGDVQRVKILFNKKENALVEMADGSQAQLAMSHLNGHKLHGKSVRITLSKHQSVQLPREGQEDQGLTKDYGSSPLHRFKKPGSKNFQNIFPPSATLHLSNIPPSVSEDDLKSLFSSNGGVVKGFKFFQKDRKMALIQMGSVEEAVQALIELHNHDLGENHHLRVSFSKSTI

SEQ ID NO: 1136 - protein, 408 aa, Homo sapiens
MTSKVPEEEHPSVTLFRQYLRICTVQPNPDYGSAVTFLEERARQLGLSCQKIEVAPGYVITVLTWPGTNPLLHSILLNSHTDVVPVFKEHWHHDPFEAFKDSEGYIYARGAQDMKSVSIQYLEAVRRLKSESHRFPRTIHMTFVPDEEVGGHKGMELFVKRPEFQALRAGFALDEGLANPTDAFTVFYSERSPWWIRVTSTGKPGHASRFIEDTAAEKLHKVVNSILAFREKERQRLQANPHLKEGAVTSVNLTKLEGGVAYNVVPATMSACFDFRVAPDVDMKAFEKQLQSWCQEAGEGVTFEFAQKFTEPRMTPTDDTDPWWAAFSGACKEMNLTLEPEIFPAATDSRYIRAVGIPALGFSPMNRTPVLLHDHNERLHEAVFLRGVDIYTRLVAALASVPALPGES

SEQ ID NO: 1137 - protein, 331 aa, Homo sapiens
MWLWEDQGGLLGPFSFVLVLLLVVTRSPFNACVLTGSLYLLLRFFSFEPVPSRRALQVLKPRDRVSAIAHRGGSHDAPENTLAAIRQAAKNGATGVELDIEFTSDGVPVLMHDNTVDRTTDGSGRLCDLTFEQVRKLNPAANHRLRNEFPDERIPTLREAVTECLCHNLTIFFDVKGHADMASAALKNIYMEFPQLYNNSMVCSFLPEVIYKMRQTDQKVITALTHRPWSLSHTGDGKPRYSVFWKQSVFVVLDILLDWSMHNVLWYLCGISAFLMQKDFVSPDYLKKWSAKGIQVVSWTVNTFDEKNYYESHLGSSYITDSMLEDCAPHF

SEQ ID NO: 1138 - protein, 331 aa, Homo sapiens; identical to SEQ ID NO: 1137

SEQ ID NO: 1139 - protein, 223 aa, Homo sapiens
MASKLLRAVILGPPGSGKGTVCERIAQNFGLQHLSSGHLLRENLKTNTEVGDVAKQYLEKGLLVPDHVITRLMMSELETRSAQHWLLDGFPRTLVQAEALDRICDVDLVISLNIPFETLKDRLSRRWIHPSSGRVYNLDFNPPQVLGVDDITGEPLVQQEDDKPEALAARLRRYKDAAKPVIELYKSRGVLHQFSGTETNRIWPYVYTLFSNKITPIQSKEAY

SEQ ID NO: 1140 - protein, 105 aa, Homo sapiens
MALRYPMAVGLNKGHKVTKNVSKPRHSRRRGRLTKHTKFVRDMIREVCAFAPYERRAMELLKVSKDKRALKFIKKRVGTHIRAKRKREELSNVLAAMRKAAAKKD

SEQ ID NO: 1141 - protein, 451 aa, Homo sapiens
MRECISIHVGQAGVQIGNACWELYCLEHGIQPDGQMPSDKTIGGGDDSFNTFFSETGAGKHVPRAVFVDLEPTVIDEVRTGTYRQLFHPEQLITGKEDAANNYARGHYTIGKEIIDLVLDRIRKLADQCTGLQGFLVFHSFGGGTGSGFTSLLMERLSVDYGKKSKLEFSIYPAPQVSTAVVEPYNSILTTHTTLEHSDCAFMVDNEAIYDICRRNLDIERPTYTNLNRLIGQIVSSITASLRFDGALNVDLTEFQTNLVPYPRIHFPLATYAPVISAEKAYHEQLSVAEITNACFEPANQMVKCDPRHGKYMACCLLYRGDVVPKDVNAAIATIKTKRTIQFVDWCPTGFKVGINYQPPTVVPGGDLAKVQRAVCMLSNTTAIAEAWARLDHKFDLMYAKRAFVHWYVGEGMEEGEFSEAREDMAALEKDYEEVGVDSVEGEGEEEGEEY

SEQ ID NO: 1142 - protein, 403 aa, Homo sapiens
MSHRKFSAPRHGSLGFLPRKRSSRHRGKVKSFPKDDPSKPVHLTAFLGYKAGMTHIVREVDRPGSKVNKKEVVEAVTIVETPPMVVVGIVGYVETPRGLRTFKTVFAEHISDECKRRFYKNWHKSKKKAFTKYCKKWQDDTGKKQLEKDFNSMKKYCQVIRIIAHTQMRLLPLRQKKAHLMEIQVNGGTVAEKLDWARERLEQQVPVNQVFGQDEMIDVIGVTKGKGYKGVTSRWHTKKLPRKTHRGLRKVACIGAWHPARVAFSVARAGQKGYHHRTEINKKIYKIGQGYLIKDGKLIKNNASTDYDLSDKSINPLGGFVHYGEVTNDFIMLKGCVVGTKKRVLTLRKSLLVQTKRRALEKIDLKFIDTTSKFGHGRFQTMEEKKAFMGPLKKDRIAKEEGA

SEQ ID NO: 1143 - protein, 364 aa, Homo sapiens
MAHRFPALTSEQKKELSEIAQRIVANGKGILAADESVGTMGNRLQRIKVENTEENRRQFRELLFSVDNSISQSIGGVILFHETLYQKDSQGKLFRNILKEKGIVVGIKLDQGGAPLAGTNKETTIQGLDGLSERCAQYKKDGVDFGKWRAVLRISDQCPSSLAIQENANALARYASICQQNGLVPIVEPEVLPDGDHDLEHCQYVSEKVLAAVYKALNDHHVYLEGTLLKPNMLTAGHACTKKYTPEQVAMATVTALHRTVPAAVPSICFLSGGMSEEDATLNLNAIYRCPLPRPWKLSFSYGRALQASALAAWGGKAANKKATQEAFMKRAVANCQAAQGQYVHTGSSGAASTQSLFTASYTY

SEQ ID NO: 1144 - protein, 445 aa, Homo sapiens
MRVISMARLVLGLVSCTFFLAVSALYSSSDDVIELTPSNFNREVIQSDSLWLVEFYAPWCGHCQRLTPEWKKAASALKDVVKVGAVNADKHQSLGGQYGVQGFPTIKIFGANKNKPEDYQGGRTGEAIVDAALSALRQLVKDRLGGRSGGYSSGKQGRGDSSSKKDVVELTDDTFDKNVLDSEDVWMVEFYAPWCGHCKNLEPEWAAAATEVKEQTKGKVKLAAVDATVNQVLASRYGIKGFPTIKIFQKGESPVDYDGGRTRSDIVSRALDLFSDNAPPPELLEIINEDIAKKTCEEHQLCVVAVLPHILDTGATGRNSYLEVLLKLADKYKKKMWGWLWTEAGAQYELENALGIGGFGYPAMAAINARKMKFALLKGSFSEQGINEFLRELSFGRGSTAPVGGGSFPNITPREPWDGKDGELPVEDDIDLSDVELDDLEKDEL

SEQ ID NO: 1145 - protein, 749 aa, Homo sapiens
MSQWFELQQLDSKFLEQVHQLYDDSFPMEIRQYLAQWLEKQDWEHAAYDVSFATIRFHDLLSQLDDQYSRFSLENNFLLQHNIRKSKRNLQDNFQEDPVQMSMIIHNCLKEERKILENAQRFNQAQEGNIQNTVMLDKQKELDSKVRNVKDQVMCIEHEIKTLEDLQDEYDFKCKTSQNRESEANGVAKSDQKQEQLLLHKMFLMLDNKRKEIIHKIRELLNSIELTQNTLINDELVEWKRRQQSACIGGPPNACLDQLQSWFTIVAESLQQVRQQLKKLEELEQKFTYEQDPITKNKQVLSDRTFVLFQQLIQSSFVVERQPCMPTHPQRPLVLKTGVQFTVKLRLLVKLQELNYNLKVKVSFDKDVNEKNTVKGFRKFNILGTHTKVMNMEESTNGSLAAEFRHLQLKEQKNAGNRTNEGPLIVTEELHSLSFETQLCQPGLVIDLETTSLPVVVISNVSQLPSGWASILWYNMLVTEPRNLSFFLNPPCAWWSQLSEVLSWQFSSVTKRGLNADQLSMLGEKLLGPNAGPDGLIPWTRFCKENINDKNFSFWPWIDTILELIKKHLLCLWNDGCIMGFISKERERALLKDQQPGTFLLRFSESSREGAITFTWVERSQNGGEPDFHAVEPYTKKELSAVTFPDIIRNYKVMAAENIPENPLKYLYPNIDKDHAFGKYYSRPKEAPEPMELDDPKRTGYIKTELISVSEVHPSRLQSTENLLPMSPEEFDEMSKIVGSEFDSMMSAV

SEQ ID NO: 1146 - protein, 257 aa, Homo sapiens [sequence omitted]

SEQ ID NO: 1147 - protein, 538 aa, Homo sapiens
MKRPKLKKASKRMTCHKRYKIQKKVREHHRKLRKEAKKRGHKKPKKDPGVPNSAPFKEALLREAELRKQQLEELKQQQKLDRQKEQERKRKLEISPDDEQSNVETQEESDEPKIKKAKSGKQNPKKLHCQELKKVIEASDIVLEVLDARDPLGCRCPQVEEAVIQSGCKKLVLVLNKSDLVPKENLENWLTYLNKELPTVVFKASTNLKNRKKTFKIKKKVVPFQSKLCCGKEALWKLLGGFQQSCGKGVQVGVVGFPNVGKSSIINSLKQERICSVGVSMGLTRSMQIVPLDKQITIIDSPCFIISPCNSPAALALRSPASIEVLRPLEAASAILSQADSQQVVLKYTVPGYKDSLDFFTKLAQRRGLHQKGGSPNVESAAKLLWSEWTGASLGYYCHPPASWNHSPHFNENITAIMKRGFNLEELEKNNAHSIQVLKGPHLTNKILFRSSGLTNGILEEKDIPEESPKQTEDQQDGDDQEHVTGEKNAEISDVTPVEETREMSPGQSTASKPSDRSFILDKMSEEDDAYDFTTDYI

SEQ ID NO: 1148 - protein, 538 aa, Homo sapiens; identical to SEQ ID NO: 1147

SEQ ID NO: 1149 - protein, 600 aa, Homo sapiens
MAALAALAKKVWSARRLLVLLLVPLALLPILFALPPKEGRCLYVILLMAVYWCTEALPLSVTALLPIILFPFMGILPSSKVCPQYFLDTNFLFLSGLIMASAIEERNLHRRIALKVLMLVGVQPARLILGMMVTTSFLSMWLSNTASTAMMLPIASAILKSLFGQRDTRKDLPREGEDSTAAVRGNGLRTVPTEMQFLASSEGGHAEDVEAPLELPDDSKEEEHRRNIWKGFLISIPYSASIGGTATLTGTAPNLILLGQLKSFFPQCDVVNFGSWFIFAFPLMLLFLLVGWLWISFLYGGMSWRGWRKKNSKLQDVAEDKAKAVIQEEFQNLGPIKFAEQAVFILFCLFAILLFSRDPKFIPGWASLFAPGFVSDAVTGVAIVTILFFFPSQKPSLKWWFDFKAPNSETEPLLSWKKAQETVPWNIILLLGGGFAMAKGCEESGLSAWIGGQLHPLEHVPPLLAVLLITVVIAFFTEFASNTATIIIFLPVLAELAIRLHVHPLYLMIPGTVSCSYAFMLPVSTPPNSIAFSTGHLLVKDMVRTGLLMNLMGVLLLSLAMNTWAQAIFQLGTFPDWANTHAANVTALPPALTNNTVQTL

SEQ ID NO: 1150 - protein, 359 aa, Homo sapiens
MAGVAGLVRGLCGRLSGLLKRLFHCSAPAAVQLTVREAINQGMDEELERDEKVFLLGEEVAQYDGAYKVSRGLWKKYGDKRIIDTPISEMGFAGIAVGAAMAGLRPICEFMTFNFSMQAIDQVINSAAKTYYMSAGLQPVPIVFRGPNGASAGVAAQHSQCFAAWYGHCPGLKVVSPWNSEDAKGLIKSAIRDDNPVVMLENELMYGVAFELPTEAQSKDFLIPIGKAKIERQGTHINVVCYSRPVGHCLEAAAVLSKGGIECEVINLRTIRPMDIEAIEASVMKTNHLVTVEGGWPQFGVGAEICARIMEGPAFNFLDAPAVRVTGADVPMPYAKILEDNSIPQVKDIIFAIKKTLNI

SEQ ID NO: 1151 - protein, 359 aa, Homo sapiens; identical to SEQ ID NO: 1150

SEQ ID NO: 1152 - protein, 420 aa, Homo sapiens
MCPKKVMWNTAVHSEFIHDHVDYGFQNCKSKFNWHVIKEKRDAYVSRLNNIYQNNLTKSHIEVIHGYATFRDGPQPTAEVNGKKFTAPHILIATGGVPTVPHENQIPGASLGITSDGFFQLEDLPSRSVIVGAGYIAVEIAGILSALGSKTSLMIRHDKVLRSFDSLISSNCTEELENAGGVEVLTVKKFSQVKEVKKTSSGLELHVVTALPGRKPTVTTIPDVDCLLWAIGRDPNSKGLNLNKLGIQTDDKGHILVDEFQNTNVKGVYAVGDVCGKALLTPVAIAAGRKLAHRLFEGKEDSRLDYDNIPTVVFSHPPIGTVGLTEDEAVHKYGKDNVKIYSTAFTPMYHAVTTRKTKCVMKMVCANKEEKVVGIHMQGIGCDEMLQGFAVAVKMGATKADFDNRVAIHPTSSEELVTLR

SEQ ID NO: 1153 - protein, 699 aa, Homo sapiens
MEVHELFRYFRMPELIDIRQYVRTLPTNTLMGFGAFAALTTFWYATRPKALKPPCDLSMQSVEVTGTTEGVRRSAVLEDDKLLLYYYDDVRTMYDGFQRGIQVSNDGPCLGSRKPNQPYEWISYKQVAEMAECIGSALIQKGFKPCSEQFIGIFSQNRPEWVTIEQGCFTYSMVVVPLYDTLGTDAITYIVNKAELSVIFADKPEKAKLLLEGVENKLTPCLKIIVIMDSYDNDLVERGQKCGVEIIGLKALEDLGRVNRTKPKPPEPEDLAIICFTSGTTGNPKGAMVTHQNIMNDCSGFIKATESAFIASPEDVLISFLPLAHMFETVVECVMLCHGAKIGFFQGDIRLLMDDLKVLQPTIFPVVPRLLNRMFDRIFGQANTSVKRWLLDFASKRKEAELRSGIVRNNSLWDKLIFHKIQSSLGGKVRLMITGAAPVSATVLTFLRAALGCQFYEGYGQTECTAGCCLSLPGDWTAGHVGAPMPCNYIKLVDVEDMNYQAAKGEGEVCVKGANVFKGYLKDPARTAEALDKDGWLHTGDIGKWLPNGTLKIIDRKKHIFKLAQGEYIAPEKIENIYLRSEAVAQVFVHGESLQAFLIAIVVPDVEILPSWAQKRGFQGSFEELCRNKDINKAILEDMVKLGKNAGLKPFEQVKGIAVHPELFSIDNGLLTPTLKAKRPELRNYFRSQIDELYSTIKI

SEQ ID NO: 1154 - protein, 699 aa, Homo sapiens; identical to SEQ ID NO: 1153

SEQ ID NO: 1155 - protein, 247 aa, Homo sapiens
MSGKDRIEIFPSRMAQTIMKARLKGAQTGRNLLKKKSDALTLRFRQILKKIIETKMLMGEVMREAAFSLAEAKFTAGDFSTTVIQNVNKAQVKIRAKKDNVAGVTLPVFEHYHEGTDSYELTGLARGGEQLAKLKRNYAKAVELLVELASLQTSFVTLDEAIKITNRRVNAIEHVIIPRIERTLAYIITELDEREREEFYRLKKIQEKKKIIKEKSEKDLERRRAAGEVMEPANLLAEEKDEDLLFE

SEQ ID NO: 1156 - protein, 396 aa, Homo sapiens
MSLALYTCLLWLCTSGLWTAQASTNESSNSHRGLAPTNVDFAFNLYQRLVALNPDKNTLISPVSISMALAMVSLGSAQTQSLQSLGFNLTETSEAEIHQSFQYLNYLLKQSDTGLEMNMGNAMFLLQKLKLKDSFLADVKQYYESEALAIDFEDWTKASQQITRHVKDKTQGKIEHVFSDLDSPASFILVNYIFLRGIWELPFSPENTREEDFYVNETSTVKVPMMVQSGSIGYFRDSVFPCQLIQMDYVGNGTAFFILPDQGQMDTVIAALSRDTIDRWGKLMTPRQVNLYIPKFSMSDTYDLKDVLEDLNIKDLLTNQSDFSGNTKDVPLTLTMVHKAMLQLDEGNVLPNSTNGAPLHLRSEPLDIKFNKPFILLLFDKFTWSSLMMSQVVNPA

SEQ ID NO: 1157 - protein, 150 aa, Homo sapiens
MAGQVKDREAFQRLNFLYQAAHCVLSQNPENQALARFYCHTEKTIAKRLVLRQDPSVKRTLCRDCSSLLIPGLTCTQRQRRRKGQRWTVQTCLTCQRSQRFLNDPKHLLWGDRPEAQLENQADFKPSEPLPNIADLSKENVQTQALNTTE

SEQ ID NO: 1158 - protein, 150 aa, Homo sapiens; identical to SEQ ID NO: 1157

SEQ ID NO: 1159 - protein, 309 aa, Homo sapiens
MGAQFSKTAAKGEAAAERPGEAAVASSPSKANGQENGHVKVNGDASPAAAEPGAKEELQANGSAPAADKEEPASGGAATPAAADKDEAAAAPEPGAATADKEAAEAEPAEPGSPSAETEGASASSTSSPKAEDGAAPSPSSETPKKKKKRFSFKKSFKLSGFSFKKSKKEAGEGAEAEGATADGAKDEAAAAAGGDAAAAPGEQAGGAGAEGAEGGESREAEAAEPEQPEQPEQPAAEEPRAEEPSEAVGEKAEEPAPGATADDAPSAAGPEQEAPAATDEPAASAAPSASPEPQPECSPEAPPAPVAE

SEQ ID NO: 1160 - protein, 395 aa, Homo sapiens
MLSEVLLVSAPGKVILHGEHAVVHGKVALAVALNLRTFLVLRPQSNGKVSLNLPNVGIKQVWDVATLQLLDTGFLEQGDVPAPTLEQLEKLKKVAGLPRDCVGNEGLSLLAFLYLYLAICRKQRTLPSLDIMVWSELPPGAGLGSSAAYSVCVAAALLTACEEVTNPLKDRGSIGSWPEEDLKSINKWAYEGERVIHGNPSGVDNSVSTWGGALRYQQGKMSSLKRLPALQILLTNTKVPRSTKALVAGVRSRLIKFPEIMAPLLTSIDAISLECERVLGEMAAAPVPEQYLVLEELMDMNQHHLNALGVGHASLDQLCQVTAAHGLHSKLTGAGGGGCGITLLKPGLERAKVEAAKQALTGCGFDCWETSIGAPGVSMHSATSIEDPVRQALGL

SEQ ID NO: 1161 - protein, 364 aa, Homo sapiens
MPHPYPALTPEQKKELADIAHRIVAPGKGILAADESTGSIAKRLQSIGTENTEENRRFYRQLLLTADDRVNPCIGGVILFHETLYQKADDGRPFPQVIKSKGGVVGIKVDKGVVPLAGTNGETTTQGLDGLSERCAQYKKDGADFAKWRCVLKIGEHTPSSLAIMENANVLARYASICQQNGIVPIVEPEILPDGDHDLKRCQYVTEKVLAAVYKALSDHHVYLEGTLLKPNMVTPGHACTQKFSNEEIAMATVTALRRTVPPAVPGVTFLSGGQSEEEASINLNAINKCPLLKPWALTFSYGRALQASALKAWGGKKENLKAAQEEYIKRALANSLACQGKYTPSGQSGAAASESLFISNHAY

SEQ ID NO: 1162 - protein, 472 aa, Homo sapiens; identical to SEQ ID NO: 1101

SEQ ID NO: 1163 - protein, 330 aa, Homo sapiens
MTHFNKGPSYGLSAEVKNKIASKYDQQAEEDLRNWIEEVTGMGIGTNFQLGLKDGIILCELINKLQPGSVKKVNESSLNWPQLENIGNFIKAIQAYGMKPHDIFEANDLFENGNMTQVQTTLVALAGLAKTKGFHTTIDIGVKYAEKQTRRFDEGKLKAGQSVIGLQMGTNKCASQAGMTAYGTRRHLYDPKMQTDKPFDQTTISLQMGTNKGASQAGMSAPGTRRDIYDQKLTLQPVDNSTISLQMGTNKVASQKGMSVYGLGRQVYDPKYCAAPTEPVIHNGSQGTGTNGSEISDSDYQAEYPDEYHGEYPDEYPREYQYGDDQGIDY

SEQ ID NO: 1164 - protein, 406 aa, Homo sapiens
MAGICPAVLCDGILGRDTLPHEDQGKGRQLHSLTLASINTDFTLSLYKKLALRNPDKNVVFSPLSISAALAILSLGAKDSTMEEILEVLKFNLTEITEEEIHQGFGHLLQRLSQPEDQAEINTGSALFIDKEQPILSEFQEKTRALYQAEAFVADFKQCNEAKKFINDYVSNQTQGKIAELFSELDERTSMVLVNYLLFKGKWKVPFNPNDTFESEFYLDEKRSVKVPMMKIKDLTTPYIRDEELSCSVLELKYTGNASALFILPDQGKMQQVESSLQPETLKKWKDSLRPRIISELRMPKFSISTDYNLEEVLPDLGIRKIFSQQADLSRITGTKNLHVSQVVHKAVLDVDETGTEGAAATAVTAALKSLPQTIPLLNFNRPFMLVITDNNGQSVFFMGKVTNPM

SEQ ID NO: 1165 - protein, 147 aa, Homo sapiens
MASLRLFLLCLAGLIFASEAGPGGAGESKCPLMVKVLDAVRGSPAVDVAVKVFKRTADGSWEPFASGKTAESGELHGLTTDEKFTEGVYRVELDTKSYWKALGISPFHEYAEVVFTANDSGHRHYTIAALLSPYSYSTTAVVSNPQN

SEQ ID NO: 1166 - protein, 627 aa, Homo sapiens [sequence omitted]

SEQ ID NO: 1167 - protein, 490 aa, Homo sapiens
MDLVMLLVLTLTCLILLSIWRQSSGRGKLPPGPIPLPIIGNIFQLNVKNITQSLTSFSKVYGPVFTLYFGTKPTVILHGYEAVKEALIDHGEEFAERGSFPVAEKINKDLGIVFSHGNRWKEIRRFTLTTLRNLGMGKRNIEDRVQEEARCLVEELRKTNGSPCDPTFILGCAPCNVICSIIFQNRFDYKDQDFLNLMEKLNENMKILSSPWTQFCSFFPVLIDYCPGSHTTLAKNVYHIRNYLLKKIKEHQESLDVTNPRDFIDYYLIKWKQENHNPHSEFTLENLSITVTDLFGAGTETTSTTLRYALLLLLKCPEVTAKVQEEIDRVVGKHRSPCMQDRSRMPYTDAHDHEVQRFIDLIPTNLPHAVTCDIKFRNYLIPKGTTIITSLSSVLHDSKEFPDPEIFDPGHFLDGNGKFKKSDYFMPFSAGKRMCAGEGLARMELFLFLTTILQNFKLKSVLHPKDIDTTPVFNGFASLPPFYELCFIPL

SEQ ID NO: 1168 - protein, 214 aa, Homo sapiens
MGRRPARCYRYCKNKPYPKSRFCRGVPDAKIRIFDLGRKKAKVDEFPLCGHMVSDEYEQLSSEALEAARICANKYMVKSCGKDGFHIRVRLHPFHVIRINKMLSCAGADRLQTGMRGAFGKPQGTVARVHIGQVIMSIRTKLQNKEHVIEALRRAKFKFPGRQKIHISKKWGFTKFNADEFEDMVAEKRLIPDGCGVKYIPNRGPLDKWRALHS

SEQ ID NO: 1169 - protein, 659 aa, Homo sapiens
MAAFSKYLTARNSSLAGAAFLLFCLLHKRRRALGLHGKKSGKPPLQNNEKEGKKERAVVDKVFLSRLSQILKIMVPRTFCKETGYLILIAVMLVSRTYCDVWMIQNGTLIESGIIGRSSKDFKRYLFNFIAAMPLISLVNNFLKYGLNELKLCFRVRLTRYLYEEYLQAFTYYKMGNLDNRIANPDQLLTQDVEKFCNSVVDLYSNLSKPFLDIVLYIFKLTSAIGAQGPASMMAYLLVSGLFLTRLRRPIGKMTIMEQKYEGEYRFVNSRLITNSEEIAFYNGNKREKQTIHSVFRKLVEHLHNFIFFRFSMGFIDSIIAKYIATVVGYLVVSRPFLDLAHPRHLHSTHSELLEDYYQSGRMLLRMSQALGRIVLAGREMTRLAGFTARITELMQVLKDLNHGKYERTMVSQQDKGIEGAQASPLIPGAGEIINADNIIKFDHVPLATPNGDILIQDLSFEVRSGANVLICGPNGCGKSSLFRVLGELWPLFGGHLTKPERGKLFYVPQRPYMTLGTLRDQVIYPDGKEDQKKKGISDQVLKGYLDNVQLGHILEREGGWDSVQDWMDVLSGGEKQRMAMARLFYHKPQFAILDECTSAVSVDVEDYIYSHCRKVGITLFTVSHRKSLWKHHEYYLHMDGRGNYEFKKITEDTVEFGS

SEQ ID NO: 1170 - protein, 210 aa, Homo sapiens
MGKGDPNKPRGKMSSYAFFVQTCREEHKKKHPDSSVNFAEFSKKCSERWKTMSAKEKSKFEDLAKSDKARYDREMKNYVPPKGDKKGKKKDPNAPKRPPSAFFLFCSEHRPKIKSEHPGLSIGDTAKKLGEMWSEQSAKDKQPYEQKAAKLKEKYEKDIAAYRAKGKSEVGKKGPGRPTGSKKKNEPEDEEEEEEEEDDEDEEEEDEDEE

SEQ ID NO: 1171 - protein, 484 aa, Homo sapiens
MERQVQRLRQTFRSGRSRPLRFRLQQLEALRRMVQEREKDILAAIAADLSKSELNAYSHEVITILGEIDFMLGNLPELASARPAKKNLLTMMDEAYVQPEPLGVVLIIGAWNYPFVLTLQPLVGAIAAGNAAIVKPSELSENTAKILAELLPQYLDQDLYMIVNGGVEETTELLRQRFDHILYTGNTAVGKIVMEAAAKHLTPVTLELGGKSPCYIDRDCDLDVACRRITWGKYMNCGQTCIAPDYILCEASSQDQIVQKIKDTVKDFYGENVKASPDYERIINLRHFKRIKSLLEGQKIAFGGETDEATRYIAPTILTDVDPNSKVMQEEIFGPILPIVSVKNVEEAINFINDREKPLALYIFSHNNKLIKRVIDETSSGGVTGNDVIMHFTVNSLPFGGVGASGMGAYHGKYSFDTFSHQRPCLLKGLKGESVNKLRYPPNSESKVSWSKFFLLKQFNKGRLQLLLLVCLVAVAAVIVKDQL

SEQ ID NO: 1172 - protein, 503 aa, Homo sapiens [sequence omitted]

SEQ ID NO: 1173 - protein, 205 aa, Homo sapiens
MTERRVPFSLLRSPSWEPFRDWYPAHSRLFDQAFGVPRFPDEWSQWFSSAGWPGYVRPLPAATAEGPAAVTLARPFSRALNRQLSSGVSEIRQTADRWRVSLDVNHFAPEELTVKTKEGVVEITGKHEERQDEHGYISRCFTRKYTLPPGVDPTLVSSSLSPEGTLTVEAPLPKAVTQSAEITIPVTFEARAQIGGPESEQSGAK

SEQ ID NO: 1174 - protein, 370 aa, Homo sapiens
MAEERQDALREFVAVTGAEEDRARFFLESAGWDLQIALASFYEDGGDEDIVTISQATPSSVSRGTAPSDNRVTSFRDLIHDQDEEEEEEEGQRFYAGGSERSGQQIVGPPRKKSPNELVDDLFKGAKEHGAVAVERVTKSPGETSKPRPFAGGGYRLGAAPEEESAYVAGERRRHSGQDVHVVLKLWKTGFSLDNGDLRSYQDPSNAQFLESIRRGEVPAELRRLAHGGQVNLDMEDHRDEDFVKPKGAFKAFTGEGQKLGSTAPQVLNTSSPAQQAENEAKASSSILINEAEPTTNIQIRLADGGRLVQKFNHSHRISDIRLFIVDARPAMAATSFVLMTTFPNKELADENQTLKEANLLNAVIVQRLT

SEQ ID NO: 1175 - protein, 370 aa, Homo sapiens; identical to SEQ ID NO: 1174

SEQ ID NO: 1176 - protein, 263 aa, Homo sapiens
MSGEQTPMCSMDLREIKGKETNMADSYHGMSWYEQYIQPCVVELLGSALFIFIGCLSVIENSPNTGLLQPALAHGLALGLIIATLGNISGGHFNPAVSLAVTLVGGLKTMLLIPYWVSQLFGGMIGAALAKVVSPEERFWNASGAAFAIVQEQEQVAEALGVEIVMTMLLVLAVCMGAVNEKTMGPLAPFSIGFSVIVDILAGGGISGACMNPARAFGPAVMAGYWDFHWIYWLGPLLAGLFVGLLIRLFIGDEKTRLILKSR

SEQ ID NO: 1177 - protein, 564 aa, Homo sapiens
MARATGPEQRLLAIYTGGTIGMRSEGGVLVPGRGLAAVLRTLHMLHDEEYARAHSLPEDTLVLPPASSDQRIIYKVLECQPLFDSSDMTITEWVQIAQTIERHYTQYQGFVVIHGTDTMAFAASVLSFMLENLQKPVILTGAQVPIHELWSDGRENLLGALLMAGQYVIPEVCLFFQNQLFRGNRTTKVDARRFAAFCSPNLPPLATVGADVTINRELVRKASWKSHLVVHSNMEPDVGLLRLYPGIPASLVRTFLQPPLKGVVMETFGSGNGPTKPDLIQELRAAAERGLIIVNCTHCLQGAVTSDYAPGMAMAGAGIISGFDMTSEAALAKLSYVLGQPGLSLSDRKKLLAKDLRGEMTLPTTDDLLGDDMLGCRATWLLSMNGSQDADAMKDVLLPGLALAAAHAGDLDTLQAFVELGRDLNLKDYSGQTPLHVAARRGHASVVAMLLQKGVDVDACNEDGQSPLLLAVRGRHQSVIRLLRAAGAHLSPQELEDVGTELCRLASRADSEGLRAWWQAGADLGQPDYDGHCALQVAEAAGNADVVALLQSLEDRVSAQPQPH

SEQ ID NO: 1178 - protein, 493 aa, Homo sapiens
MVEIKKICCIGAGYVGGPTCSVIARMCPEIRVTVVDVNEARINAWNSPTLPIYEPGLKEVVESCRGKNLFFSTNIDDAIREADLVFISVNTPTKTYGMGKGRAADLKYIEACARRIVQNSNGYKIVTEKSTVPVRAAESIRRIFDANTKPNLNLQVLSNPEFLAEGTAIKDLKNPDRVLIGGDETPEGQRAVQALCAVYEHWVPKEKILTTNTWSSELSKLAANAFLAQRISSINSISALCESTGADVEEVATAIGMDQRIGNKFLKASVGFGGGCFQKDVLNLVYLCEALNLPEVARYWQQVIDMNDYQRRRFASRIIDSLFNTVTDKKIAILGFAFKKDTGDTRESSSIYISKYLMDEGAHLHIYDPKVPREQIVVDLSHPGVSADDQVSRLVTISKDPYEACDGAHALVICTEWDMFKELDYERIHKRMLKPAFIFDGRRVLDGLHNELQTIGFQIETIGKKVSSKRIPYTPGEIPKFSLQDPPNKKPKV

SEQ ID NO: 1179 - protein, 527 aa, Homo sapiens
MSQDTEVDMKDVELNELEPEKQPMNAADGAAAGEKNGLVKIKVAEDEAEAGVKFTGLSKEELLKVAGSPGWVRTRWALLLLFWLGWLGMLAGAVVIIVRAPRCRELPVQRWWHKGALYRIGDLQAFVGPEARGIAGLKNHLEYLSTLKVKGLVLGPIHKNQKDEVNETDLKQIDPDLGSQEDFKDLLQSAKKKSIHIILDLTPNYKGQNAWFLPPQADIVATKMKEALSSWLQDGVDGFQVRDVGKLANASLYLAEWQNITKNFSEDRLLIAGTASSDLQQIVNILESTSDLLLTSSYLSQPVFTGEHAELLVIKYLNATGSRWCSWSVSQAGLLTSFIPAQFLRLYQLLLFTLPGTPVFSYGDELGLQAVALPGQPMEAPFMLWNESSNSQTSSPVSLNMTVKGQNEDPGSLLTQFRRLSDLRGKERSLLHGDFDALSSSSGLFSYVRHWDQNERYLVVLNFQDVGLSARVGASNLPAGISLPASANLLLSTDSTRLSREEGTSLSLENLSLNPYEGLLLQFPFVA

SEQ ID NO: 1180 - protein, 227 aa, Homo sapiens
MPEINASNLDEKQVQLLAEMCILIDENDNKIGADTKKNCHLNENIDKGLIHRAFSVFLFNTENKLLLQQRSDAKITFPGCFTNSCCSHPLNNPGELEENDAMGVKRAAQKRLKAELGIPLEEVDLNEMNYLTRIYYKAQSDGIWGEHEIDYILFLRKNVTLNPDPNEIKSYCYVSKEELKEILKKEARGEIKFTPWFKIIADAFLFKWWDNLNHLSPFVDHEKIHRM

SEQ ID NO: 1181 - protein, 1321 aa, Homo sapiens
MSDSVILRSVKKFGEENHAFESDGSHNNDKKSRLQDKMKEGDIRVGFFELFRFSSSKDIWLMLMGGVCALLHGMAQPGILIIFGIMTDIFIKYDIERQELEIPGKACVNNTIVWINSSFHQNMTNGTVCGLVDIESEMIKFSGIYAGVGMTVLILGYFQIRLWVITGARQIRRMRKIYFRRIMRMEIGWFDCTSVGELNSRFADDIEKINDAIADQLAHFLQRMSTAMCGLLLGFYRGWKLTLVILAVSPLIGIGAAVIGLSIAKFTELELKAYAKAGSIADEVLSSIRTVAAFGGENKEVERYEKNLVFAQRWGIWKGMVMGFFTGYMWCLIFFCYALAFWYGSTLVLDEEEYTPGTLVQIFLCVILAAMNIGHASSCLEIFSTGCSAATNIFQTIDRQPVIDCMSGDGYKLDRIKGEIEFHNVTFHYPSRPDVKILDNLSMVIKPGETTALVGSSGAGKSTALQLIQRFYDPCEGMVTLDGHDIRSLNIRWLRDQIGIVEQEPVLFSTTIAENIRFGREDATMEDIVQAAKDANAYNFIMALPQQFDTLVGEGGGQMSGGQKQRVAIARALIRNPKILLLDMATSALDNESEARVQEALNKIQHGHTIISVAHRLSTVRAADVIIGFEHGVAVERGTHEELLERKGVYFMLVTLQSQGDNAHKETSIMGKDATEGGTLERTFSRGSYRDSLRASIRQRSKSQLSLLTHDPPLAVADHKSSYKDSKDNDVLVEEVEPAPVRRILKYNIPEWHYILVGSLSAAINGAVTPIYSLLFSQLLGTFSLLDKEQQRSEIHSMCLFFVILGCVSIFTQFLQGYTFAKSGELLTKRLRKFGFKAMLGQDIGWFDDLRNNPGVLTTRLATDASQVQGATGSQVGMMVNSFTNIIAALLIAFFFSWKLSLIITIFFPFLALSGAVQTKMLTGFASQDKQALEKAGQITSEALSNIRTVAGIGVEGRFIKAFEVELQTSYKTAVRKANIYGLCFAFSQGIAFLANSAAYRYGGYLIAYEGLGFSHVFRVVSSVALSATAVGRTFSYTPSYAKAKISAARFFQLLDRKPPINVYSEAGEKWDNFQGKIDFIDCKFTYPSRPDIQVLNGLSVSVNPGQTLAFVGSSGCGKSTSIQLLERFYDPDQGTVMIDGHDSKKVNIQFLRSNIGIVSQEPVLFDCSIMDNIKYGDNTKEISVERAIAAAKQAQLHDFVMSLPEKYETNVGIQGSQLSRGEKQRIAIARAIVRDPKILLLDEATSALDTESEKTVQTALDKAREGRTCIVIAHRLSTIQNSDIIAVVSQGVVIEKGTHEKLMAQKGAYYKLVITGAPIS

SEQ ID NO: 1182 - protein, 327 aa, Homo sapiens
MSQARPATVLGAMEMGRRMDVTSSSASVRAFLQRGHTEIDTAFVYANGQSETILGDLGLGLGRSGCKVKIATKAAPMFGKTLKPADVRFQLETSLKRLQCPRVDLFYLHFPDHGTPIEETLQACHQLHQEGKFVELGLSNYVSWEVAEICTLCKKNGWIMPTVYQGMYNAITRQVETELFPCLRHFGLRFYAFNPLAGGLLTGRYKYQDKDGKNPESRFFGNPFSQLYMDRYWKEEHFNGIALVEKALKTTYGPTAPSMISAAVRWMYHHSQLKGTQGDAVILGMSSLEQLEQNLALVEEGPLEPAVVDAFDQAWNLVAHECPNYFR

SEQ ID NO: 1183 - protein, 572 aa, Homo sapiens
MHWLWKIPRLCTFWGTEMFHRSFHMNIKKLMPIQWGHQEVPAKFNFASDVIDHWASLEKAGKRSPGPALWWMNGSGEELKWNFRELSEISKQTANVLTGACGLQRGDRVAVVLPRVPEWWLVTLGCMRSGLVFMPGTTQMKSTDILYRLQSSKARAIVAGDEVVQEVDAVAPDCSFLKIKLLVSEKNREGWLNFKALLKDASPIHQCVETVSQESAAIYFTSGTSGPPKMAEHSHCSLGLKAKMDAGWTGLGPSDTMWTISDTGWILNILGSFLEPWVLGTCIFVHLLPKFDPQTVLKVLSSYPINTLLGAPLIYRMLLQQDLSSYKFPHLHSCFSGGETLLPETLESWKAKTGLEIREIYGQTETGITCRVSRTMKVKPGYLGTAIVPYDVQVIDEQGNVLPPGKEGDMALRVKPIRPIGMFSGYVDNPKKTQANIRGDFWLLGDRGIKDTEGYFHFMGRTDDIINSSGYRIGPSEVENALMEHPAVVETAVISSPDPIRREVVKAFVVLAPEFLSHDQDQLTKVLQEHVKSVTAPYKYPRKVEFVLDLPKTITGKIERAKLRAKEWKTSG

SEQ ID NO: 1184 - protein, 390 aa, Homo sapiens
  misc_feature (315)..(315): Xaa can be any naturally occurring amino acid
MADIDNKEQSELDQDLEDVEEVEEEETGEETKIKARQLTVQMMQNPQILAALQERLDGLVDTPTGYIESLPKVVKRRVNALKNLQVKCAQIEAKFYEEVHDLERKYAVLYQPLFDKRFEIINAIYEPTEEECEWKPDEEDEVSEELKEKAKIEDEKKDEEKEDPKGIPEFWLTVFKNDLLSDMVQEHDEPILKHLKDIKVKFSDAGQPMSFILEFHFEPNEYFTNEVLTKTYRMRSEPDDSDPFSFDGPEIMGCTGCQIDWKKGKNVTLKTIKKKQKHKGRGTVRTVTKTVSKTSFFNFFAPPEVPENGDLDDDXEAILAADFEIGHFLRERIIPRSVLYFTGEAIEDDDDDYDEEGEEADEEGEEEGDEENDPDYDPKKDQNPAECKQQ

SEQ ID NO: 1185 - protein, 390 aa, Homo sapiens; identical to SEQ ID NO: 1184
  misc_feature (315)..(315): Xaa can be any naturally occurring amino acid

SEQ ID NO: 1186 - protein, 530 aa, Homo sapiens
MSSTASYRIFNFARNRIAVLRGGRRLYSRAATSRNQVKWRLFSPASLAVNDSSPHGGFALRKAYRHTSTEEEDFHLQLSPEQVSDLLRAGESSHKVLDFNSGVPNSVLRFESNQLAANSPVEDRQGVASCVQTRGTMFGIFDGHGGHACAQAVSERLFYYMAVSLMSHKTLEQMEEAMENMKPLLPILQWLKHPGDSIYKDITSVHLDHLRVYWQELLDLHMETGLSTEEALMYSFQRLDSDISLEIQAPLEDEVTKNLSLQVAFSGATACMAHVDGVHLHIANAGDCRAILGVQGDNGAWSCLPLTCDHNAWNEAELSRLKREHPESEDRTLIIDDRLLGVLLPCRAFGDVQLKWSKELQRNVLERGFDTEALNIYQFTPPHYHTPPYLTAKPEVTYHRLRPQDKFLVLASDGLWDMLDNEDVVRLVVGHLSKVGHQKPALDQRPANLGHMQSLLLQRKASGLHAADQNAATHLIRHAIGSNEYGEMEPERLAAMLTLPEDVARMYRDDITVMVVFFNSESIDTYFKEG

SEQ ID NO: 1187 - protein, 472 aa, Homo sapiens; identical to SEQ ID NO: 1101

SEQ ID NO: 1188 - protein, 472 aa, Homo sapiens; identical to SEQ ID NO: 1101

SEQ ID NO: 1189 - protein, 2472 aa, Homo sapiens
MDPSGVKVLETAEDIQERRQQVLDRYHRFKELSTLRRQKLEDSYRFQFFQRDAEELEKWIQEKLQVASDENYKDPTNLQGKLQKHQAFEAEVQANSGAIVKLDETGNLMISEGHFASETIRTRLMELHRQWELLLEKMREKGIKLLQAQKLVQYLRECEDVMDWINDKEAIVTSEELGQDLEHVEVLQKKFEEFQTDLAAHEERVNEVNQFAAKLIQEQHPEEELIKTKQEEVNAAWQRLKGLALQRQGKLFGAAEVQRFNRDVDETIGWIKEKEQLMASDDFGRDLASVQALLRKHEGLERDLAALEDKVKALCAEADRLQQSHPLSANQIQVKREELITNWEQIRTLAAERHARLDDSYRLQRFLADFRDLTSWVTEMKALINADELANDVAGAEALLDRHQEHKGEIDAHEDSFKSADESGQALLAAGHYASDEVREKLSILSEERAALLELWELRRQQYEQCMDLQLFYRDTEQVDNWMSKQEAFLLNEDLGDSLDSVEALLKKHEDFEKSLSAQEEKITALDEFATKLIQNNHYAMEDVATRRDALLSRRNALHERAMHRRAQLADSFHLQQFFRDSDELKSWVNEKMKTATDEAYKDPSNLQGKVQKHQAFEAELSANQSRIDALEKAGQKLIDVNHYAKEEVAARMNEVISLWKKLLEATELKGVKLREANQQQQFNRNVEDIELWLYEVEGHLASDDYGKDLTNVQNLQKKHALLEADVAAHQDRIDGITIQARQFQDAGHFDAENIKKKQEALVARYEALKEPMVARKQKLADSLRLQQLFRDVEDEETWIREKEPIAASTNRGKDLIGVQNLLKKHQALQAEIAGHEPRIKAVTQKGNAMVEEGHFAAEDVKAKLSELNQKWEALKAKASQRRQDLEDSLQAQQYFADANEAESWMREKEPIVGSTDYGKDEDSAEALLKKHEALMSDLSAYGSSIQALREQAQSCRQQVAPMDDETGKELVLALYDYQEKSPREVTMKKGDILTLLNSTNKDWWKVEVNDRQGFVPAAYVKKLDPAQSASRENLLEEQGSIALRQGQIDNQTRITKEAGSVSLRMKQVEELYQSLLELGEKRKGMLEKSCKKFMLFREANELQQWINEKEAALTSEEVGADLEQVEVLQKKFDDFQKDLKANESRLKDINKVAEDLESEGLMAEEVQAVQQQEVYGMMPRDEADSKTASPWKSARLMVHTVATFNSIKELNERWRSLQQLAEERSQLLGSAHEVQRFHRDADETKEWIEEKNQALNTDNYGHDLASVQALQRKHEGFERDLAALGDKVNSLGETAQRLIQSHPESAEDLKEKCTELNQAWTSLGKRADQRKAKLGDSHDLQRFLSDFRDLMSWINGIRGLVSSDELAKDVTGAEALLERHQEHRTEIDARAGTFQAFEQFGQQLLAHGHYASPEIKEKLDILDQERTDLEKAWVQRRMMLDHCLELQLFHRDCEQAENWMAAREAFLNTEDKGDSLDSVEALIKKHEDFDKAINVQEEKIAALQAFADQLIALDHYAKGDIANRRNEVLDRWRRLKAQMIEKRSKLGESQTLQQFSRDVDEIEAWISEKLQTASDESYKDPTNIQSKHQKHQAFEAELHANADRIRGVIDMGNSLIERGACAGSEDAVKARLAALADQWQFLVQKSAEKSQKLKEANKQQNFNTGIKDFDFWLSEVEALLASEDYGKDLASVNNLLKKHQLLEADISAHEDRLKDLNSQADSLMTSSAFDTSQVKEKRDTINGRFQKIKSMATSRRAKLSESHRLHQFFRDMDDEESWIKEKKLLVSSEDYGRDLTGVQNLRKKHKRLEAELAAHEPAIQGVLDTGKKLSDDNTIGQEEIQQRLAQFVEHWKELKQLAAARGQRLEESLEYQQFVANVEEEEAWINEKMTLVASEDYGDTLAAIQGLLKKHEAFETDFTVHKDRVNDVCTNGQDLIKKNNHHEENISSKMKGLNGKVSDLEKAAAQRKANVDENSAFLQFNWKADVVESWIGEKENSLKTDDYGRDLSSVQTLLTKQETFDAGLQAFQQEGIANITALKDQLLAAKHIQSKAIEARHASLMKRWTQLLANSATRKKKLLEAQSHFRKVEDLFLTFAKKASAFNSWFENAEEDLTDPVRCNSLEEIKALREAHDAFRSSLSSAQADFNQLAELDRQIKSFRVASNPYTWFTMEALEETWRNLQKIIKERELELQKEQRRQEENDNVRQEFAQHANAFHQWIQETRTYLLDGSCMVEESGTLESQLEATKRKHQEIRAMRSQLKKIEDLGAAMEEALILDNKYTEHSTVGLAQQWDQLDQLGMRMQHNLEQQIQARNTTGVTEEALKEFSMMFKHFDKDKSGRLNHQEFKSCLRSLGYDLPMVEEGEPDPEFEAILDTVDPNRDGHVSLQEYMAFMISRETENVKSSEEIESAFRALSSEGKPYVTKEELYQNLTREQADYCVSHMKPYVDGKGRELPTAFDYVEFTRSLFVN

SEQ ID NO: 1190 - protein, 350 aa, Homo sapiens
MGLSNVQLWTILLWALAWVQSTRSACPSCGAPTLTPQGERALVLELAKQQILEGLHLTSRPRITRPLPQAALTRALRRLQPRSMVPGNREKVISFATSIDKSTSTYRSVLTFQLSPLWSHHLYHARLWLHVPPSFPATLYLRIFGCGTTRCRGSRTFLAEHQTTSSGWHALTLPSSGLRSEESGVTKLQLEFRPLDLNSTTARLPRLLLDTAGQQRPFLELKIRANEPGAGRARRRTPTCESETPLCCRRDHYVDFQELGWRDWILQPEGYQLNYCSGQCPPHLAGSPGIAASFHSAVFSLLKANNPWPAGSSCCVPTARRPLSLLYLDHNGNVVKTDVPDMVVEACGCS

SEQ ID NO: 1191 - protein, 724 aa, Homo sapiens
MPEEVHHGEEEVETFAFQAEIAQLMSLIINTFYSNKEIFLRELISNASDALDKIRYESLTDPSKLDSGKELKIDIIPNPQEATLTLVDTGIGMTKADLINNLGTIAKSGTKAFMEALQAGADISMIGQFGVGFYSAYLVAEKVVVITKHNDDEQYAWESSAGGSFTVRADHGEPIGRGTKVILHLKEDQTEYLEERRVKEVVKKHSQFIGYPITLYLEKEREKEISDDEAEEEKGEKEEEDKEDEEKPKIEDVGSDEEDDSGKDKKKKTKKIKEKYIDQEELNKTKPIWTRNPDDITQEEYGEFYKSLTNDWEDHLAVKHFSVEGQLEFRALLFIPRRAPFDLFENKKKKNNIKLYVRRVFIMDSCDDLIPEYLNFIRGVVDSEDLPLNISREMLQQSKILKVIRKNIVKKCLELFSELAEDKENYKKFYEAFSKNLKLGIHEDSTNRRRLSELLRYHTSQSGDEMTSLSEYVSRMKETQKSIYYITGESKEQVANSAFVERVRKRGFEVVYMTEPIDEYCVQQLKEFDGKSLVSVTKEGLELPEDEEEKKKMEESKARFENLCKLMKEILDKKVEKVTISNRLVSSPCCIVTSTYGWTANMERIMKAQALRDNSTMGYMMAKKHLEINPDHPIVETLRQKAEADKNDKAVKDLVVLLFETALSSLASHFRRPKTHSNRIYRMIKLGLGIDEDEVTAEEPSAAVPDEIPPLEGDEDASRMEEVD

SEQ ID NO: 1192 - protein, 724 aa, Homo sapiens; identical to SEQ ID NO: 1191

SEQ ID NO: 1193 - protein, 292 aa, Homo sapiens
MHPARPALWAAALTALTLLRGPPVARAGAGAVGAGPVVRCEPCDARALAQCAPPPTAPACTELVREPGCGCCLTCALREGDACGVYTERCGTGLRCQPRPAEQYPLKALLNGRGFCANASAASNLSAYLPSQPSPGNTTESEEDHNAGSVESQVVPSTHRVTDSKFHPLHSKMEVIIKGQARDSQRYKVDYESQSTDTQNFSSESKRETEYGPCRREMEDTLNHLKFLNVLSPRGVHIPNCDKKGFYKKKQCRPSKGRKRGFCWCVDKYGQPLPGYDTKGKDDVHCLSVQSQ

SEQ ID NO: 1194 - protein, 184 aa, Homo sapiens
MPQSKSRKIAILGYRSVGKSSLTIQFVEGQFVDSYDPTIENTFTKLITVNGQEYHLQLVDTAGQDEYSIFPQTYSIDINGYILVYSVTSIKSFEVIKVIHGKLLDMVGKVQIPIMLVGNKKDLHMERVISYEEGKALAESWNAAFLESSAKENQTAVDVFRRIILEAEKIDGAASQGKSSCSVM

SEQ ID NO: 1195 - protein, 223 aa, Homo sapiens
MAAEDVVATGADPSELEGGGLLQEIFTSPLNLLLLGLCIFLLYKIVRGDQPGASGDNDDDEPPPLPRLKPRDFTPAELRRYDGVQDPRILMAINGKVFDVTKGRKFYGPEGPYGVFAGRDASRGLATFCLDKEALKDEYDDLSDLTPAQQETLNDWDSQFSSPSSTITWGKLLEGAEEPIVYSDDEEQKMRLLGRVTEAVSGAYLFLYFAKSFVTFQSVFTTW

SEQ ID NO: 1196 - protein, 309 aa, Homo sapiens
MDEKLFTKELDQWIEQLNECKQLSESQVKSLCEKAKEILTKESNVQEVRCPVTVCGDVHGQFHDLMELFRIGGKSPDTNYLFMGDYVDRGYYSVETVTLLVALKVRYRERITILRGNHESRQITQVYGFYDECLRKYGNANVWKYFTDLFDYLPLTALVDGQIFCLHGGLSPSIDTLDHIRALDRLQEVPHEGPMCDLLWSDPDDRGGWGISPRGAGYTFGQDISETFNHANGLTLVSRAHQLVMEGYNWCHDRNVVTIFSAPNYCYRCGNQAAIMELDDTLKYSFLQFDPAPRRGEPHVTRRTPDYFL

SEQ ID NO: 1197 - protein, 429 aa, Homo sapiens
MSVNVNRSVSDQFYRYKMPRLIAKVEGKGNGIKTVIVNMVDVAKALNRPPTYPTKYFGCELGAQTQFDVKNDRYIVNGSHEANKLQDMLDGFIKKFVLCPECENPETDLHVNPKKQTIGNSCKACGYRGMLDTHHKLCTFILKNPPENSDIGTGKKEKEKKNRKGKDKENGSVSTSETPPPPPPNEISPPHAVEEEEDDDWGEDTTEEAQRRRMDEISDHAKGLTLSDDLERTVEERVNILFDFVKKKKEEGIIDSSDKDIVAEAERLDVKAMGPLVLTEVLFDEKIREQIKKYRRHFLRFCHNNKKAQRYLLHGLECVVAMHQAQLISKIPHILKEMYDADLLEEEVIISWSEKASKKYVSKELAKEIRVKAEPFIKWLKEAEEESSGGEEEDEDENIEVVYSKTASVPKVETVKSDNKDDDIDIDAI

SEQ ID NO: 1198 - protein, 260 aa, Homo sapiens
MKIELLPALTDNYMYLIIDEDTQEAAVVDPVQPQKVIETVKKHRVKLTTVLTTHHHWDHAGGNEKLVKLEPGLKVYGGDDRIGALTHKVTHLSTLEVGSLSVKCLSTPCHTSGHICYFVSKPGSSEPSAVFTGDTLFVAGCGKFYEGTADEMYKALLEVLGRLPPDTKVICGHEYTVNNLKFARHVEPGNTAVQEKLAWAKEKNAIGEPTVPSTLAEEFTYNPFMRVKEKTVQQHAGETDPVTTMRAIRREKDQFKVPRD

SEQ ID NO: 1199 - protein, 335 aa, Homo sapiens
MAASLGFRGAASGLRYWSGRRRPVGSLAAVCSRSMASKTPVGFIGLGNMGNPMAKNLIKHGYPLILYDVFPDVCKEFKEAGEQVASSPADVAEKADRIITMLPSSMNSIEVYSGANGILKKVKKGSLLIDSSTIDPSVSKELAKEVEKMGAVFMDAPVSGGVGAARSGNLTFMVGGVENEFAAAQELLGCMGSNVLYCGAVGSGQSAKICNNMLLAISMIGTAEAMNLGIRSGLDPKLLAKILNMSSGRCWSSDTYNPVPGVMDGVPSSNNYQGGFGTTLMAKDLGLAQDSATSTKTPILLGSVAHQIYRMMCSKGYSKKDFSSVFQYLREEETF

SEQ ID NO: 1200 - protein, 115 aa, Homo sapiens [sequence omitted]

SEQ ID NO: 1201 - protein, 449 aa, Homo sapiens
MPKNKKRNAPHRGGGGGGGSGAATSAATTGGPHRTVQPFSDEDASIETMSHCSGYSDPSSFAEDGPEVLDEEGTQEDLEYKLKGLIDLTLDKSAKTRQAALEGVKNALSSKVLYEFVLERRMTLTDSIERCLKKGKSDGQRAAAALASVLCIQLGPGLESEEILKTLGPILKKIICDGTASIQARQTCATCFGVCCFIATDDITELYSTLECLEGIFTKSYLKEKDTNVPCSTPNTVLHISSLLAWTLLLTICPISEVKKKLELHFHKLPSLLSCDDVNMRIAAGESLALLFELARGMESDFFYEDMDSLTQMLRALATDGNKHRAKVDKRKQRSVFRDVLRAVEERDFPTETVKFGPERMYIDSWVKKHTYDTFKEALGSGMQYHLQTNEFLRNVFELGPPVMLDAATLKTMKIPRFERHLYNSAAFKARTKARSKCRDKRADVGEFF

SEQ ID NO: 1202 - protein, 699 aa, Homo sapiens; identical to SEQ ID NO: 1153

SEQ ID NO: 1203 - protein, 375 aa, Homo sapiens
MDDDIAALVVDNGSGMCKAGFAGDDAPRAVFPSIVGRPRHQGVMVGMGQKDSYVGDEAQSKRGILTLKYPIEHGIVTNWDDMEKIWHHTFYNELRVAPEEHPVLLTEAPLNPKANREKMTQIMFETFNTPAMYVAIQAVLSLYASGRTTGIVMDSGDGVTHTVPIYEGYALPHAILRLDLAGRDLTDYLMKILTERGYSFTTTAEREIVRDIKEKLCYVALDFEQEMATAASSSSLEKSYELPDGQVITIGNERFRCPEALFQPSFLGMESCGIHETTFNSIMKCDVDIRKDLYANTVLSGGTTMYPGIADRMQKEITALAPSTMKIKIIAPPERKYSVWIGGSILASLSTFQQMWISKQEYDESGPSIVHRKCF

SEQ ID NO: 1204 - protein, 236 aa, Homo sapiens
MGVEGCTKCIKYLLFVFNFVFWLAGGVILGVALWLRHDPQTTTLLYLELGDKPAPSTFYVGIYILIAVGAVMMFVGFLGCYGAIQESQCLLGTFFTCLVILFACEVAAGIWGFVNKDQIAKDVKQFYDQALQQAVMDDDANNAKAVVKTFHETLNCCGSNTLTTLTTAVLRNSLCPSSSNSFTQLLKEDCHQKIDELFSGKLYLIGIAAIVVAVIMIFEMILSMVLCCGIRNSSVY

SEQ ID NO: 1205 - protein, 236 aa, Homo sapiens; identical to SEQ ID NO: 1204

SEQ ID NO: 1206 - protein, 304 aa, Homo sapiens
MARGKAKEEGSWKKFIWNSEKKEFLGRTGGSWFKILLFYVIFYGCLAGIFIGTIQVMLLTISELKPTYQDRVAPPGLTQIPQIQKTEISFRPNDPKSYEAYVLNIIRFLEKYKDSAQKDDMIFEDCGSMPSEPKERGEFNHERGERKVCRFKLDWLGNCSGLNDESYGYKEGKPCIIIKLNRMLGFKPKPPKNESLETYPLTMKYNPNVLPVQCTGKRDEDKDKVGNIEYFGMGGFYGFPLQYYPYYGKLLQPKYLQPLLAVQFTNLTLDTEIRIECKAYGENIGYSEKDRFQGRFDVKIEVKS

SEQ ID NO: 1207 - protein, 217 aa, Homo sapiens
MAPFASLASGILLLLSLIASSKACSCAPTHPQTAFCNSDLVIRAKFMGSPEIIETTLYQRYEIKMTKMLKGFDAVGNATGFRFAYTPAMESLCGYVHKSQNRSEEFLIAGRLRNGNLHITACSFLVPWHNLSPAQQKAFVKTYSAGCGVCTVFPCSAIPCKLESDSHCLWTDQILMGSEKGYQSDHFACLPRNPDLCTWQYLGVSMTRSLPLAKAEA

SEQ ID NO: 1208 - protein, 451 aa, Homo sapiens; identical to SEQ ID NO: 1141

SEQ ID NO: 1209 - protein, 254 aa, Homo sapiens
MAAYKLVLIRHGESAWNLENRFSGWYDADLSPAGHEEAKRGGQALRDAGYEFDIVFTSVQKRAIRTLWTVLDAIDQMWLPVVRTWRLNERHYGGLTGLNKAETAAKHGEAQVKIWRRSYDVPPPPMEPDHPFYSNISKDRRYADLTEDQLPSCESLKDTIARALPFWNEEIVPQIKEGKGVLIPAHGNSYGGIVKHLEGLSEEAIMELNLPTGIPIVYELDKNLKPIKPMQSLGDEETVRKAMEAVAAQGKVKK

SEQ ID NO: 1210 - protein, 272 aa, Homo sapiens
MAAKVFESIGKFGLALAVAGGVVNSALYNVDAGHRAVIFDRFRGVQDIVVGEGTHFLIPWVQKPIIFDCRSRPRNVPVITGSKDLQNVNITLRILFRPVASQLPRIYTSIGEDYDERVLPSITTEILKSVVARFDAGELITQRELVSRQVSDDLTERAATFGLILDDVSLTHLTFGKEFTEAVEAKQVAQQEAERARFVVEKAEQQKKAAIISAEGDSKAAELIANSLATAGDGLIELRKLEAAEDIAYQLSRSRNITYLPAGQSVLLQLPQ

SEQ ID NO: 1211 - protein, 491 aa, Homo sapiens
MDTSVLLLLAVLLSFLLFLVRGHAKVHGHLPPGPRPLPLLGNLLQMDRGGFRKSFIQLQEKHGDVFTVYFGPRPVVMLCGTQTIREALVDHAEAFSGRGIIAVLQPIMQEYGVSFVNEERWKILRRLFVATMRDFGIGKQSVEDQIKEEAKCLVEELKNHQGVSLDPTFLFQCVTGNIICSIVFGERFDYRDRQFLRLLDLLYRTFSLISSFSSQMFEVYSDFLKYFPGVHREIYKNLKEVLDYIDHSVENHRATLDPNAPRDFIDTFLLHMEKEKLNHYTEFHHWNLMISVLFLFLAGTESTSNTLCYGFLLMLKYPHVAEKVQKEIDQVIGSQRVPTLDDRSKMPYTEAVIHEIQRFSDVSPMGLPCRITKDTLFRGYLLPKNTEVYFILSSALHDPQYFEQPDTFNPEHFLDANGALKKCEAFMPFSIGKRMCLGEGIARSELFLFFTTILQNYSVSSPVDPNTIDMTPKESGLAKVAPVYKICFVAR

SEQ ID NO: 1212 - protein, 102 aa, Homo sapiens
MAGQAFRKFLPLFDRVLVERSAAETVTKGGIMLPEKSQGKVLQATVVAVGSGGKGKGGEIQPVSVKVGDKVLLPEHGGTKVVLDDKDYFLFRDGDILGKYVD

SEQ ID NO: 1213 - protein, 102 aa, Homo sapiens; identical to SEQ ID NO: 1212

SEQ ID NO: 1214 - protein, 519 aa, Homo sapiens
MLRAALSTARRGPRLSRLLSAAATSAVPAPNQQPEVFCNQIFINNEWHDAVSKKTFPTVNPSTGEVICQVAEGNKEDVDKAVKAAQAAFQLGSPWRRMDASDRGRLLYRLADLIERDRTYLAALETLDNGKPYVISYLVDLDMVLKCLRYYAGWADKYHGKTIPIDGDFFSYTRHEPVGVCGQIIPWNFPLLMQAWKLGPALATGNVVVMKVAEQTPLTALYVANLIKEAGFPPGVVNIVPGFGPTAGAAIASHEDVDKVAFTGSTEVGHLIQVAAGSSNLKRVTLELGGKSPNIIMSDADMDWAVEQAHFALFFNQGQCCCAGSRTFVQEDVYDEFVERSVARAKSRVVGNPFDSRTEQGPQVDETQFKKILGYIKSGQQEGAKLLCGGGAAADRGYFIQPTVFGDVKDGMTIAKEEIFGPVMQILKFKTIEEVVGRANNSKYGLAAAVFTKDLDKANYLSQALQAGTVWINCYDVFGAQSPFGGYKMSGSGRELGEYGLQAYTEVKTVTVKVPQKNS

SEQ ID NO: 1215 - protein, 1331 aa, Homo sapiens
MTADELVFFVNGKKVVEKNADPETTLLVYLRRKLGLCGTKLGCGEGGCGACTVMISKYDRLQNKIVHFSVNACLAPICSLHHVAVTTVEGIGNTQKLHPVQERIARSHGSQCGFCTPGIVMSMYTLLRNQPEPTVEEIENAFQGNLCRCTGYRPILQGFRTFAKDGGCCGGSGNNPNCCMNQTKDQTVSLSPSLFNPEDFKPLDPTQEPIFPPELLRLKDTPQKKLRFEGERVTWIQASTMEELLDLKAQHPDAKLVVGNTEIGIEMKFKNMLFPLIVCPAWIPELNSVVHGPEGISFGASCPLSLVESVLAEEIAKLPEQKTEVFRGVMEQLRWFAGKQVKSVASIGGNIITASPISDLNPVFMASGAKLTLVSRGTRRTVRMDHTFFPGYRKTLLRPEEILLSIEIPYSKEGEFFSAFKQASRREDDIAKVTSGMRVLFKPGTIEVQELSLCFGGMADRTISALKTTPKQLSKSWNEELLQSVCAGLAEELQLAPDAPGGMVEFRRTLTLSFFFKFYLTVLQKLGRADLEDMCGKLDPTFASATLLFQKDPPANVQLFQEVPKDQSEEDMVGRPLPHLAANMQASGEAVYCDDIPRYENELSLRLVTSTRAHAKITSIDTSEAKKVPGFVCFLTAEDVPNSNATGLFNDETVFAKDEVTCVGHIIGAVVADTPEHAQRAARGVKITYEDLPAIITIQDAINNNSFYGSEIKIEKGDLKKGFSEADNVVSGELYIGGQEHFYLETNCTIAVPKGEAGEMELFVSTQNTMKTQSFVAKMLGVPDNRIVVRVKRMGGGFGGKETRSTVVSTALALAAHKTGRPVRCMLDRDEDMLITGGRHPFLAKYKVGFMKTGTVVALEVAHFSNGGNTEDLSRSIMERALFHMDNAYKIPNIRGTGRICKTNLPSNTAFRGFGGPQGMLIAEYWMSEVAITCGLPAEEVRRKNMYKEGDLTHFNQKLEGFTLPRCWDECIASSQYLARKREVEKFNRENCWKKRGLCIIPTKFGISFTLPFLNQGGALVHVYTDGSVLLTHGGTEMGQGLHTKMVQVASRALKIPTSKIHISETSTNTVPNTSPTAASASADLNGQGVYEACQTILKRLEPFKKKKPTGPWEAWVMDAYTSAVSLSATGFYKTPNLGYSFETNSGNPFHYFSYGVACSEVEIDCLTGDHKNLRTDIVMDVGSSLNPAIDIGQVEGAFVQGLGLFTMEELHYSPEGSLHTRGPSTYKIPAFGSIPIEFRVSLLRDCPNKRAIYASKAVGEPPLFLASSIFFAIKDAIRAARAQHGDNAKQLFQLDSPATPEKIRNACVDQFTTLCVTGVPENCKSWSVRI

SEQ ID NO: 1216 - protein, 136 aa, Homo sapiens [sequence omitted]

SEQ ID NO: 1217 - protein, 889 aa, Homo sapiens
MKNPFAHLAEPLDPAQPGKKFFNLNKLEDSRYGRLPFSIRVLLEAAVRNCDEFLVKKNDIENILNWSIMQHKSIEVPFKPARVILQDFTGVPAVVDFAAMRDAVKKLGGNPEKINPVCPADLVIDHSIQVHFNRRADSLQKNQDLEFERNRERFEFLKWGSQAFCNMRIIPPGSGIIHQVNLEYLARVVFDQDGCYYPDSLVGTDSHTTMIDGLGVLGWGVGGIEAEAVMLGQPISMVLPQVIGYKLMGKPHPLVTSTDIVLTITKHLRQVGVVGKFVEFFGPGVAQLSIADRATIANMCPEYGATAAFFPVDDVSIAYLVQTGREEDKVKHIKRYLQAVGMFRDFSDSSQDPDFTQVVELDLKTVVPCCSGPKRPQDKVAVSEIEKDFESCLGAKQGFKGFQVAPDHHNDHKTFIYNDSEFTLAHGSVVIAAITSCTNTSNPSVMLGAGLLAKKAVEAGLNVKPYVKTSLSPGSGVVTYYLRESGVMPYLSQLGFDVVGYGCMTCIGNSGPLPEPVVEAITQGDLVAVGVLSGNRNFEGRVHPNTRANYLASPPLVIAYAIAGTVRIDFEKEPLGVNAQGQQVFLKDIWPTRDEIQEVERKYVIPGMFKEVYQKIETVNKSWNALAAPSEKLYAWNPKSTYIKSPPFFESLTLDLQPPKSIVDAYVLLNLGDSVTTDHISPAGNIARNSPAARYLTNRGLTPRDFNSYGSRRGNDAIMARGTFANIRLLNKFLNKQAPQTVHLPSGETLDVFDAAERYQQAGLPLIVLAGKEYGSGSSRDWAAKGPFLLGIKAVLAESYERTHCSNLVGMGVIPLEYLPGETADSLGLTGRERYTIHIPEHLKPRMKVQIKLDTGKTFQAVMRFDTDVELTYFHNGGILNYMIRKMAQ

SEQ ID NO: 1218 - protein, 520 aa, Homo sapiens
MPGSLPLNAEACWPKDVGIVALEIYFPSQYVDQAELEKYDGVDAGKYTIGLGQARMGFCTDREDINSLCLTVVQKLMERNSLSYDCIGRLEVGTETIIDKSKSVKSNLMQLFEESGNTDIEGIDTTNACYGGTAAVFNAVNWIESSSWDGRYALVVAGDIAIYASGNARPTGGVGAVALLIGPNAPVIFDRGLRGTHMQHAYDFYKPDMLSEYPVVDGKLSIQCYLSALDRCYSVYRKKIRAQWQKEGKDKDFTLNDFGFMIFHSPYCKLVQKSLARMFLNDFLNDQNRDKNSIYSGLEAFGDVKLEDTYFDRDVEKAFMKASAELFNQKTKASLLVSNQNGNMYTSSVYGSLASVLAQYSPQQLAGKRIGVFSYGSGLAATLYSLKVTQDATPGSALDKITASLCDLKSRLDSRTCVAPDVFAENMKLREDTHHLANYIPQCSIDSLFEGTWYLVRVDEKHRRTYARRPSTNDHSLDEGVGLVHSNTATEHIPSPAKKVPRLPATSGEPESAVISNGEH

SEQ ID NO: 1219 - protein, 597 aa, Homo sapiens
MMDLELPPPGLQSQQDMDLIDILWRQDIDLGVSREVFDFSQRQKDYELEKQKKLEKERQEQLQKEQEKAFFAQLQLDEETGEFLPIQPAQHIQTDTSGSVSYSQVAHIPKQDALYFEDCMQLLAETFPFVDDHESLALDIPSHVESSVFTTPDQAQSLDSSLETAMTDLSSIQQDMEQVWQELFSIPELQCLNTENKQQAETTTVPSPEATLTEMDSNYHFYSSIPSLEKEVDSCSPHFLHGFEDSFSSILSTDDASQLNSLDSNPTLNTDFGDEFYSAFLAEPSGGGSMPSSAAISQSLSELLGGPIEGCDLSLCKAFNQKHTEGTVEFNDSDSGISLNTSPSRASPEHSVESSIYGDPPPGFSDSEMEELDSAPGSVKQNGPKAQPTHSSGDTVQPLSPAQGHSAAVHESQCENTTKKEVPVSPGHQKVPFTKDKHSSRLEAHLTRDELRAKALHIPFPVEKIINLPVDDFNEMMSKEQFNEAQLALIRDIRRRGKNKVAAQNCRKRKLENIVELEQDLGHLKDEREKLLREKGENDRNLHLLKRKLSTLYLEVFSMLRDEDGKPYSPSEYSLQQTRDGNVFLVPKSKKPDTKKN

SEQ ID NO: 1220 - protein, 597 aa, Homo sapiens; identical to SEQ ID NO: 1219

SEQ ID NO: 1221 - protein, 429 aa, Homo sapiens; identical to SEQ ID NO: 1197

SEQ ID NO: 1222 - protein, 279 aa, Homo sapiens
MLPLLRCVPRALGAAATGLRASIPAPPLRHLLQPAPRPCLRPFGLLSVRAGSARRSGLLQPPVPCACGCGALHTEGDKAFVEFLTDEIKEEKKIQKHKSLPKMSGDWELEVNGTEAKLLRKVAGEKITVTFNINNSIPPTFDGEEEPSQGQKAEEQEPELTSTPNFVVEVTKTDGKKTLVLDCHYPEDEIGHEDEAESDIFSIKEVSFQTTGDSEWRDTNYTLNTDSLDWALYDHLMDFLADRGVDNTFADELVELSTALEHQEYITFLEDLKSFVKSQ

SEQ ID NO: 1223 - protein, 375 aa, Homo sapiens; identical to SEQ ID NO: 1203

SEQ ID NO: 1224 - protein, 558 aa, Homo sapiens
MYRRLGEVLLLSRAGPAALGSAAADSAALLGWARGQPSAVPQPGLTPVARRHYSEAATDREDDPNFFKMVEGFFDRGASIVEDKLVEDLKTRENEEQKRNRVRGILRIIKPCNHVLSLSFPIRRDDGSWEVIEGYRAQHSQHRTPCKGGIRYSTDVSVDEVKALASLMTYKCAVVDVPFGGAKAGVKINPKNYTDNELEKITRRFTMELAKKGFIGPGIDVPAPDMSTGEREMSWIADTYASTIGHYDINAHACVTGKPISQGGIHGRISATGRGVFHGIENFINEASYMSILGMTPGLGDKTFVVQGFGNVGLHSMRYLHRFGAKCVGVGESDGSIWNPDGIDPKELEDFKLQHGSILGFPKAKVYEGSILEADCDILIPAASEKQLTKSNAPRVKAKIIAEGANGPTTPEADKIFLERNIMVIPDLYLNAGGVTVSYFEWLKNLNHVSYGRLTFKYERDSNYHLLMSVQESLERKFGKHGGTIPVVPTAEFQDRISGASEKDIVHSGLAYTMERSARQIMRTAMKYNLGLDLRTAAYVNAIEKVFKVYNEAGVTFT

SEQ ID NO: 1225 - protein, 266 aa, Homo sapiens
MGAGCVKVTKYFLFLFNLLFFILGAVILGFGVWILADKSSFISVLQTSSSSLQVGAYVFIGVGAITMLMGFLGCIGAVNEVRCLLGLYFVFLLLILIAQVTVEVLFYFNANKLKQEMGNTVMDIIQNYSVNASSSREEAWDYVQAQVKCCGWVSPSNWTRNPVLKNSTKTTYPCSCEKTKEEDNQLIVKKGFCESDNSTASENSPEDWPVHPEGCMEKAQAWLQENFGILLGVCAGVAVIELLGLFLSICLCRYIHSEDYSKVPKY

SEQ ID NO: 1226 - protein, 24 aa, Homo sapiens
  misc_feature (1)..(1): Xaa can be any naturally occurring amino acid
XAEEMKVAENGAQSAPLPLQGVDI

SEQ ID NO: 1227 - protein, 183 aa, Homo sapiens
MTSQIRQNYSTEVEAAVNRLVNLHLRASYTYLSLGFFFDRDDVALEGVGHFFRELAEEKREGAERLLKLQNERGGRALFQDVQKPSQDEWGKTLEAMKAALALEKNLNQALLDLHALGSAQADPHLCDFLESHFLDKEVKLIKKMGNHLTNLRRWQGPQPAQTGVAQASLGEYLFERLTLKHD

SEQ ID NO: 1228 - protein, 183 aa, Homo sapiens; identical to SEQ ID NO: 1227

SEQ ID NO: 1229 - protein, 373 aa, Homo sapiens
MATSASSHLNKGIKQMYMNLPQGEKIQLMYIWVDGTGEGLRCKTRTLDCDPKCVEELPEWNFDGSSTFQSEGSNSDMYLHPVAMFRDPFRRDPNKLVFCEVFKYNRKPAETNLRHSCKRIMDMVSSQRPWFGMEQEYTLMGTDGHPFGWPSNGFPGPQGPYYCGVGADKAYGRDIVEAHYRACLYAGIKITGTNAEVMPAQWEFQIGPCEGIRMGDHLWVARFILHRVCEDFGVIATFDPKPIPGNWNGAGCHTNFSTKAMREENGLRCIEEAIDKLSKRHQYHIRAYDPKGGLDNARRLTGFHETSNINDFSAGVANRSASIRIPRIVGQEKKGYFEDRRPSANCDPYAVTEAIVRTCLLNETGDEPFQYKN

SEQ ID NO: 1230 - protein, 558 aa, Homo sapiens; identical to SEQ ID NO: 1224

SEQ ID NO: 1231 - protein, 274 aa, Homo sapiens
MGTDSRAAGALLARASTLHLQTGNLLNWGRLRKKCPSTHSEELRDCIQKTLNEWSSQISPDLVREFPDVLECTMSHAVEKINPDEREEMKVSAKLFIVGSNSSSSTRNAVDMACSVLGVAQLDSVIMASPPIEDGVNLSLEHLQPYWEELENLVQSKKIVAIGTSDLDKTQLEQLYQWAQVKPNSNQVNLASCCVMPPDLTAFAKQFDIQLLTHNDPKELLSEASFQEALQESIPDIEAQEWVPLWLLRYSVIVKSRGIIKSKGYILQAKRKGS

SEQ ID NO: 1232 - protein, 423 aa, Homo sapiens
MAGRQSGWSQAALLQFLLGMCLMVMPPIQARSLRFVTLLYRHGDRSPVKAYPKDPYQEEKWPQGFGQLTKEGMLQHWELGQALRQRYHGFLNASYHRQEVYVRSTDFDRTLMSAEANLAGLFPPTEVQHFNPNISWQPIPVHTVPITEDRLLKFPLGPCPRYEQLQNETRQTPEYQNMSIQNAQFLDMVANETGLMNLTLETIWNVYDTLFCEQTHGLLLPPWASPQTVQALSQLKDFSFLFLFGIHDQVQKARLQGGVLLAQILKNLTLMATTSQFPKLLVYSAHDTTLVALQMALNVYNGKQAPYASCHIFELYQEDNGNFSVEMYFRNDSKKAPWPLTLPGCPHRCPLQDFLRLTEPVIPKDWQKECQLASDTADTEVIVALAVCGSILFLLIVLLLTVLFRMQAQPPGYHHVADREDHA

SEQ ID NO: 1233 - protein, 284 aa, Homo sapiens
WERETRKARDTGRNFKVNLRTLLRYYNQSDDESHTLQWMYGCDVGPDGHLLRGYCQEAYDGRDYISLNEDLRSWTATDMASQASKIKSEEVGEAHHQRAYLQGPCVEWLHTYLHLGKETLLRSDPPKAHVTLHPRPEGDVTLRCWALGFYPADITLTWQLNGEDLTQDMELVETRPAGDGTFQKWAAVVVPSGEELKYTCHVEHEGLPEPLALRWEPSPFTDSSMPVIVVLGAVAIIGAVAIIGAVAIIGAVVRRRKRNTGEKGSYAHVLGSKAFQISDWPQKA

SEQ ID NO: 1234 - protein, 724 aa, Homo sapiens; identical to SEQ ID NO: 1191

SEQ ID NO: 1235 - protein, 761 aa, Homo sapiens
MEGPQLCLVLLVLGLSSGGVSATPVLEARPQVSCSLEGVEIKGGSFQLLQDGQALEYLCPSGFYPYPVQTRTCKSTGSWSVLQTRDQKIVKKAECRAIRCPRPQDFENGEFWPRSPYYNLSDQISFQCYDGYTLRGSANRTCQENGRWDGQTAICDDGAGYCPNPGIPIGTRKVGSQYRLEDTVTYHCSRGLVLRGSQQRRCQEGGSWSGTEPSCQDSFMYDSPQEVAEAFLSSLTETIEGADAEDGHSPGEQQKRKIILDPSGSMNIYMVLDGSDSIGASNFTGAKRCLANLIEKVASYGVKPRYGLVTYATVPKVLVRVSEERSSDADWVTEKLNQISYEDHKLKSGTNTKKALQAVYSMMSWPGDAPPEGWNRTRHVIIIMTDGLHNMGGDPVTVIEDIRDLLDIGRDRKNPREDYLDVYVFGVGPLVDPVNINALASKKNNEQHVFKVKDMEDLENVFYKMIDETKSLGLCGMVWEHQKGGDYYKQPWQAKISVTRPLKGHENCMGAVVSEYFVLTAAHCFTVEDQKHSIKVNVEGKRRDLEIEEVLFHPNYDINGKKAEGISEFYDYDVALIKLKTKLKYSQTLRPICLPCTEGTTRALRLPQTATCKQHKEELLPMKDVKALFVSEEGKKLTRKEVYIKNGEKKASCERDATKAQGYEKVKVASEVVTPRFLCTGGVDPYADPNTCKGDSGGPLIVHKRSRFIQVGVISWGVVDVCKDPRRQQLVPSYARDFHINLFQVLPWLKEKLKDEDLGFL

SEQ ID NO: 1236 - protein, 424 aa, Homo sapiens
MAALAVLHGVVRRPLLRGLLQEVRCLGRSYASKPTLNDVVIVSATRTPIGSFLGSLASQPATKLGTIAIQGAIEKAGIPKEEVKEVYMGNVIQGGEGQAPTRQATLGAGLPIATPCTTVNKVCASGMKAIMMASQSLMCGHQDVMVAGGMETMSNVPYVMSRGATPYGGVKLEDLIVKDGLTDVYNKIHMGNCAENTAKKLSISREEQDKYAIGSYTRSKEAWDAGKFANEITPITISVKGKPDVVVKEDEEYKRVDFSKVPKLKTVFQKENGTVTAANASTLNDGAAAVVLMTAEAAQRLKVKPLARIAAFADAAVDPIDFPLAPAYAVPKVLKYAGLKKEDIAMWEVNEAFSVVVLANIKMLEIDPQKVNVHGGAVSLGHPIGMSGARIVVHLAHALKQGEFGLASICNGGGGASAVLIEKL

SEQ ID NO: 1237 - protein, 127 aa, Homo sapiens
MSSSHLFYLALCLLTFTSSATAGPETLCGAELVDALQFVCGPRGFYFNKPTGYGSSIRRAPQTGIVDECCFRSCDLRRLEMYCVRCKPTKSARSIRAQRHTDMPKTQKEVHLKNTSRGSAGNKTYRM

SEQ ID NO: 1238 - protein, 611 aa, Homo sapiens
MAHWGRDTLSHEDHGKGRQLHSLTLASSNTDFALSLYKKLALRNPDKNVVFSPLSISAALTILSLGAKDSTMEEILEGLKFNLTEITEEEIHQGFGHLLQRLSQPEDQVEINTGSALFIDKEQPILSEFQEKTRALYQAEAFIADFKQPNEAKKLINDYVSNQTQGKIAELFSDLEERTSMVLVNYLLFKGKMQQVESSLQPETLKKWKDSLIPRIINDLRMPKFSISTDYSLKEVLPELGIKKVFSQQADLSRITGTKDLYVSQVVHKAVLDVDETGTEATAATGVATVIRRQPRTLNFNRPFMVVITDMDSQSILFVAKITNPKRPVKVPMMKLEDLTTPYVQDEELNCTVVELKYTGNASALFILPDQGKMQQVEASLQPETLRRWKDSLRPSMIDELYPPKFSISADYSVEECRAPSNGEQRVLYSKGLFPEESCCRMSFLLARRWARDVGCETEEVLPELGIKEVFSTQADLSGITGDKDLTVSQEAGAGGMLNPPLAASILAVPSEDVEKLPVRKLLPLPTAILQFVVVHKAVLDVAETGTEAAAATGVKLVPMSAKLDPLIIVFNRPFLIIMSDTETEIAPFWPRYLTPNEIRTSQGLTLLPRH

SEQ ID NO: 1239 - protein, 435 aa, Homo sapiens
MKTKFCTGGEAEPSPLGLLLSCGGSAAPTPGVGQQRDAAGELESKQLGGRSQPLALPPPPPPPLPLPPPPSPPLADEQPEPRTRRRAYLWCKEFLPGAWRGLREDQFHISVIRGGLSNMLFQCSLPDSIASVGDEPRKVLLRLYGAILKMGAEAMVLESVMFAILAERSLGPKLYGIFPQGRLEQFIPSRRLDTEELCLPDISAEIAEKMATFHGMKMPFNKEPKWLFGTMEKYLNQVLRLKFSREARVQQLHKFLSYNLPLELENLRSLLQYTRSPVVFCHNDCQEGNILLLEGQENSEKQKLMLIDFEYSSYNYRGFDIGNHFCEWMYDYTYEKYPFFRANIQKYPTRKQQLHFISSYLTTFQNDFESLSSEEQSATKEDMLLEVNRFALASHFLWGLWSIVQAKISSIEFGYMEYAQARFDAYFDQKRKLGV

SEQ ID NO: 1240 - protein, 246 aa, Homo sapiens
MSRGSSAGFDRHITIFSPEGRLYQVEYAFKAINQGGLTSVAVRGKDCAVIVTQKKVPDKLLDSSTVTHLFKITENIGCVMTGMTADSRSQVQRARYEAANWKYKYGYEIPVDMLCKRIADISQVYTQNAEMRPLGCCMILIGIDEEQGPQVYKCDPAGYYCGFKATAAGVKQTESTSFLEKKVKKKFDWTFEQTVETAITCLSTVLSIDFKPSEIEVGVVTVENPKFRILTEAEIDAHLVALAERD

SEQ ID NO: 1241 - protein, 219 aa, Homo sapiens
MLQAGAPTAGSFRTGEVHTGTTIMAVEFDGGVVVGSDSRVSAGAAVVNRVFDKLSPLHQRIYCALSGSAADAQAIADMAAYQLELHGLELEEPPLVLAAANIVKNISYKYREDLLAHLMVAGWDQHEGGQVYGTMGGMLIRQPFAIGGSGSTYIYGYVDAAYKPGMTPEECRRFTTDAITLAMNRDGSSGGVIYLVTITADGVDHRVILGDELPKFYDE

SEQ ID NO: 1242 - protein, 219 aa, Homo sapiens; identical to SEQ ID NO: 1241

SEQ ID NO: 1243 - protein, 322 aa, Homo sapiens
MSSEPETQQPPAAPAAALSAADTKPGSTGSGAGSGGPGGLTSAAPAGGDKKVIATKVLGTVKWFNVRNGYGFINRNDTKEDVFVHQTAIKKNNPRKYLRSVGDGETVEFDVVEGEKGAEAANVTGPGGVPVQGSKYAADRNHYRRYPRRRGPPRNYQQNYQNSESGEKNEGSESAPEGQAQQRRPYRRRRFPPYYMRRPYARRPQYSNPPVQGEVMEGADNQGAGEQGRPVRQNMYRGYRPRFRRGPPRQRQPREDGNEEDKENQGDETQGQQPPQRRYRRNFNYRRRRPENPKPQDGKETKAADPPAENSSAPEAEQGGAE

SEQ ID NO: 1244 - protein, 502 aa, Homo sapiens
MDLLSALTLETWVLLAVVLVLLYGFGTRTHGLFKKQGIPGPKPLPFFGTVLNYYMGLWKFDVECHKKYGKIWGLFDGQMPLFAITDTEMIKNVLVKECFSVFTNRRYFGPVGIMGKAISVSKDEEWKRYRALLSPTFTSGRLKEMFPVIEQYGDILVKYLRQEKGKPVPVKEVFGAYSMDVITSTSFGVNVDSLNNPKDPFVEKAKKLLRIDFFDPLFLSVVLFPFLTPVYEMLNICMFPKDSIEFFKKFVYRMKETRLDSVQKHRVDFLQLMMNAHNDSKDKESHTALSDMEITAQSIIFIFAGYEPTSSTLSFVLHSLATHPDTQKKLQEEIDRALPNKAPPTYDTVMEMEYLDMVLNETLRLYPIGNRLERVCKKDVEINGVFMPKGSVVMIPSYALHRDPQHWPEPEEFRPERFSKENKGSIDPYVYLPFGNGPRNCIGMRFALMNMKLALTKVLQNFSFQPCKETQIPLKLSRQGLLQPTKPIILKVVPRDEIITGS

SEQ ID NO: 1245 - protein, 424 aa, Homo sapiens; identical to SEQ ID NO: 1236

SEQ ID NO: 1246 - protein, 172 aa, Homo sapiens
MSSKKAKTKTTKKRPQRATSNVFAMFDQSQIQEFKEAFNMIDQNRDGFIDKEDLHDMLASLGKNPTDAYLDAMMNEAPGRINFTMFLTMFGEKLNGTDPEDVIRNAFACFDEEATGTIQEDYLRELLTTMGDRFTDEEVDELYREAPIDKKGNFNYIEFTRILKHGAKDKDD

SEQ ID NO: 1247 - protein, 285 aa, Homo sapiens; identical to SEQ ID NO: 1110

SEQ ID NO: 1248 - protein, 285 aa, Homo sapiens; identical to SEQ ID NO: 1110

SEQ ID NO: 1249 - protein, 278 aa, Homo sapiens
MAEMRPGPVVGKQLNEQPDHSPLVQPGLAELRRRAQEEGVPETPQPLTDAFLLRFLRARDFDLDLAWRLMKNYYKWRAECPELSADLHPRSILGLLKAGYHGVLRSRDPTGSRVLIYRISYWDPKVFTAYDVFRVSLITSELIVQEVETQRNGVKAIFDLEGWQISHAFQITPSVAKKIAAVVTDSFPLKVRGIHLINEPVIFHAVFSMIKPFLTEKIKGRIHLHGNNYKSSLLQHFPDILPLEYGGNESSMEDICQEWTNFIMKSEDYLSSISETIQ

SEQ ID NO: 1250 - protein, 475 aa, Homo sapiens
MTTILTSTFRNLSTTSKWALRFSVRPLSCSSQVQSAPAVQTKSKKTLAKPNLKNIVVVEGVRIPFLLSGTSYKDLMPHDLARAALSGLLYRTNIPKDVVDYIIFGTVIQEVKTSNVAREAALGAGFSDKTPAHTVTMACISSNQAMTTAVGLIASGQCDVVVAGGVELMSDVPIRHSRNMRKMMLDLNKAKTLAQRLSLLTKFRLNFLSPELPAVAEFSTNETMGHSADRLAAAFAVSRMEQDKYALRSHSLAKKAQDEGHLSDIVPFKVPGKDTVSKDNGIRPSSLEQMAKLKPAFIKPYGTVTAANSSFLTDGASAMLIMSEDRALAMGYKPKAYLRDFIYVSQDPKDQLLLGPTYATPKVLEKAGLTMNDIDAFEFHEAFSGQILANFKAMDSDWFAQNYMGRKTKVGAPPLEKFNIWGGSLSLGHPFGATGCRLVMAAANRLRKDGGQYALVAACAAGGQGHAMIVEAYPK

SEQ ID NO: 1251 - protein, 322 aa, Homo sapiens
MDSISLRVALNDGNFIPVLGFGTTVPEKVAKDEVIKATKIAIDNGFRHFDSAYLYEVEEEVGQAIRSKIEDGTVKREDIFYTSKLWSTFHRPELVRTCLEKTLKSTQLDYVDLYIIHFPMALQPGDIFFPRDEHGKLLFETVDICDTWEAMEKCKDAGLAKSIGVSNFNCRQLERILNKPGLKYKPVCNQVECHLYLNQSKMLDYCKSKDIILVSYCTLGSSRDKTWVDQKSPVLLDDPVLCAIAKKYKQTPALVALRYQLQRGVVPLIRSFNAKRIKELTQVFEFQLASEDMKALDGLNRNFRYNNAKYFDDHPNHPFTDE

SEQ ID NO: 1252 - protein, 885 aa, Homo sapiens
MARQGCLGSFQVISLFTFAISVNICLGFTASRIKRAEWDEGPPTVLSDSPWTNTSGSCKGRCFELQEVGPPDCRCDNLCKSYSSCCHDFDELCLKTVRGWECTKDRSGEVRNEENACHCPEDCLSRGDCCTNYQVVCKGESHWVDDAARNQSSECLQVCPPPLIIFSVDGFRASYMKKGSKVMPNIEKLRSCGTHVPYTRPVYPTKTFPNLYTLATGLYPESHGIVGNSMYDPVFDASFHLRGREKFNHRWWGGQPLWITATKQGVRAGTFFWSVSIPHERRILTILQWLSLPDNERPSVYAFYSEQPDFSGHKYGPFGPEMTNPLREIDKTVGQLMDGLKQLRLHRCVNVIFVGDHGMEDVTCDRTEFLSNYLTNVDDITLVPGTLGRIRAKSINNSKYDPKTIIANLTCKKPDQHFKPYMKQHLPKRLHYANNRRIEDIHLLVDRRWHVARKPLDVYKKPSGKCFFQGDHGFDNKVNSMQTVFVGYGPTFKYRTKVPPFENIELYNVMCDLLGLKPAPNNGTHGSLNHLLRTNTFRPTMPDEVSRPNYPGIMYLQSEFDLGCTCDDKVEPKNKLEELNKRLHTKGSTEAETGKFRGSKHENKKNLNGSVEPRKERHLLYGRPAVLYRTSYDILYHTDFESGYSEIFLMPLWTSYTISKQAEVSSIPEHLTNCVRPDVRVSPGFSQNCLAYKNDKQMSYGFLFPPYLSSSPEAKYDAFLVTNMVPMYPAFKRVWAYFQRVLVKKYASERNGVNVISGPIFDYNYDGLRDTEDEIKQYVEGSSIPVPTHYYSIITSCLDFTQPADKCDGPLSVSSFILPHRPDNDESCNSSEDESKWVEELMKMHTARVRDIEHLTGLDFYRKTSRSYSEILTLKTYLHTYESEI

SEQ ID NO: 1253 - protein, 885 aa, Homo sapiens; identical to SEQ ID NO: 1252

SEQ ID NO: 1254 - protein, 875 aa, Homo sapiens
MDSRLALATEEPIKKDSLKRYKILCAVLLALLVIVSLGLGLGLGLRKPEEHIGSCRKKCFDSSHRGLEGCRCDSGCTDRGDCCWDFEDTCVKSTQIWTCNSFRCGETRLEAALCSCADDCLQREDCCTDYKAVCQGEVPWVTEACASSQEPQCPEGFDQPPVILFSMDGFRAEYLQTWSTLLPNINKLKTCGLHSKYMRAVYPTKTFPNHYTIVTGLYPESHGIIDNNMYDVYLNKNFSLSSVEKSNPAWWSGQPIWLTAMYQGLKAASYYWPGSDVAVNGSFPNIYRNYSNSVPYESRIATLLQWLDLPKAERPSFYTIYVEEPDSAGHKSGPVSAGVIKALQLVDDAFGMLMEGLKQRNLHNCVNIIVLADHGMDQTSCDRVEYMTDYFPEINFYMYQGPAPRIRTRNIPQDFFTFNSEEIVRDLSCRKSDQHFKPYLTPDLPKRLHYAKNVRIDKVHLMVDRQWLAYRNKGSSNCEGGTHGYNNEFKSMEAIFLAHGPSFKEKTVIEPFENIEVYNLLCDLLHIQPAPNNGSHGSLNHLLKAPFYQPSHAEELSKSAGCGFTTPLPKDSLNCSCLALQTSGQEEQVNQRLNLNRGEVSATEKTNLPFGRPRVIQKNKDHCLLYHREYVSGFGKAMKMPMWSSYTVPKPGDTSSLPPTVPDCLRADVRVDPSESQKCSFYLADQNIDHGFLYPPAIKGNNESQYDALITSNLVPMYKEFKKMWDYFHKVLLIKYAIERNGVNVVSGPIFDYNYDGHFDAPDEITNYVAGTDVPVPTHYFVVLTSCKNKTHTPDSCPGWLDVLPFVVPHRPTNVESCPENKAEDLWVEERFKAHIARVRDVELLTGLDFYQEKTQPVSEILQLKTYLPTFETII

SEQ ID NO: 1255 - protein, 254 aa, Homo sapiens
MSYDRAITVFSPDGHLFQVEYAQEAVKKGSTAVGVRGRDIVVLGVEKKSVAKLQDERTVRKICALDDNVCMAFAVVASVSGLTADARIVINRARVECQSHRLTVGDPVTVEYITRYIASLKQRYTQSNGRRPFGISALIVGFDFDGTPRLYQTDPSGTYHAWKANAIGRGAKSVREFLEKNYTDDAIETDDLTIKLVIKALLEVVQSGGKNIELAVMRRDQPLKILSPEEIEKYVAEIEKEKEENEKKKQKKAS

SEQ ID NO: 1256 - protein, 254 aa, Homo sapiens; identical to SEQ ID NO: 1255

SEQ ID NO: 1257 - protein, 530 aa, Homo sapiens
MACLLPAARLPAGFLFLVLWGSVLGDKLLVVPQDGSHWLSMKEIVEHLSERGHDIVVLVPEVNLLLGESKYYRRKSFPVPYNLEELRTRYRSFGNNHFAASSPLMAPLREYRNNMIVIDMCFFSCQSLLKDSATLSFLRENQFDALFTDPAMPCGVILAEYLKLPSIYLFRGFPCSLEHMLGQSPSPVSYVPRFYTKFSDHMTFPQRLANFIANILENYLYHCLYSKYEILASDLLKRDVSLPALHQNSLWLLRYDFVFEYPRPVMPNMIFIGGTNCKKKGNLSQEFEAYVNASGEHGIVVFSLGSMVSEIPEKKAMEIAEALGRIPQTVLWRYTGTRPSNLAKNTILVKWLPQNDLLGHPKARAFITHSGSHGIYEGICNGVPMVMMPLFGDQMDNAKRMETRGAGVTLNVLEMTADDLENALKTVINNKSYKENIMRLSSLHKDRPIEPLDLAVFWVEYVMRHKGAPHLRPAAHDLTWYQYHSLDVIGFLLAIVLTVVFIVYKSCAYGCRKCFGGKGRVKKSHKSKTH

SEQ ID NO: 1258 - protein, 531 aa, Homo sapiens
MAPADIPASLPLGLCLLLASGFGHAGKLLVVPMDGSHWFTMQMVVEKLLPKGHEVVVVVPEVSWQLGKPLNFTVKTYSVSHTQEDLNREFKFFIDSQWKTQQEGGVLPLLTSPAQGFFELLFSHCRSLFKDKKLVEYLKQSSFDAVFLDPFDVCGLTVAKYFSLPSVVFSRGIFCHYLEEGSQCPSPPSYVPRGILKLTDTMTFKERVWNLLSYMGEHAFCPSFFKTATDIASEVLQTPVTMTDLFSPVSVWLLRTDFTLELPRPVMPNVIHIGGINCHQRKPLSKEFEAYVNASGEHGIVVFSLGSMVSEIPEKKAMEIAEALGRIPQTVLWRYTGTRPSNLAKNTILVKWLPQNDLLGHPKARAFITHSGSHGIYEGICNGVPMVMMPWKTPLKLSSITRVTRRTSCASPAFTRTVLSLFGHQMDNAKRMQTRGAGVTLNVLEMTADDEPLDLAVFWVEYVMRHKGAPHLRPAAHDLTWYQYHSLDVIGFLLAIVFTVVFIVYKSCAYGCRKCFGGKGRVKKSHKSKTH

SEQ ID NO: 1259 - protein, 535 aa, Homo sapiens
MSVVCRSSCSLLLLPCLLLCVLGPSASHAGKLLVIPIDGSHWLSMLGVIQQLQQKGHEVVVIAPEASIHIKEGSFYTMRKYPVPFQNENVTAAFVELGRSVFDQDPFLLRVVKTYNKVKRDSSMLLSGCSHLLHNAEFMASLEQSHFDALLTDPFLPCGSIVAQYLSLPAVYFLNALPCSLDLEATQCPAPLSYVPKSLSSNTDRMNFLQRVKNMIIALTENFLCRVVYSPYGSLATEILQKEVTVKDLLSPASIWLMRNDFVKDYPRPIMPNMVFIGGINCLQKKALSQEFEAYVNASGEHGIVVFSLGSMVSEIPEKKAMEIAEALGRIPQTVLWRYTGTRPSNLAKNTILVKWLPQNDLLGHPKARAFITHSGSHGIYEGICNGVPMVMMPLFGDQMDNAKRMETRGAGVTLNVLEMTADDLENALKTVINNKSYKENIMRLSSLHKDRPIEPLDLAVFWVEYVMRHKGAPHLRPAAHDLTWYQYHSLDVIGFLLAIVLTVVFIVYKSCAYGCRKCFGGKGRVKKSHKSKTH

SEQ ID NO: 1260 - protein, 420 aa, Homo sapiens
MAKLTAVPLSALVDEPVHIRVTGLTPFQVVCLQASLKDDKGNLFNSQAFYRASEVGEVDLERDSSLGGDYMGVHPMGLFWSMKPEKLLTRLVKRDVMNRPHKVHIKLCHPYFPVEGKVISSSLDSLILERWYMAPGVTRIHVKEGRIRGALFLPPGEGPFPGVIDLFGGAGGLFEFRASLLASHGFATLALAYWGYDDLPSRLEKVDLEYFEEGVEFLLRHPKVLGPGVGILSVCIGAEIGLSMAINLKQITATVLINGPNFVSSNPHVYRGKVFQPTPCSEEFVTTNALGLVEFYRTFEETADKDSKYCFPIEKAHGHFLFVVGEDDKNLNSKVHAKQAIAQLMKSGKKNWTLLSYPGAGHLIEPPYSPLCSASRMPFVIPSINWGGEVIPHAAAQEHSWKEIQKFLKQHLNPGFNSQL

SEQ ID NO: 1261 - protein, 208 aa, Homo sapiens; identical to SEQ ID NO: 1130

SEQ ID NO: 1262 - protein, 208 aa, Homo sapiens; identical to SEQ ID NO: 1130

SEQ ID NO: 1263 - protein, 238 aa, Homo sapiens
MAKPCGVRLSGEARKQVDAFRQNLFQEAEDFLCTFLPRKIISLSQLLQEDSLNVADLSSLRAPLDIPIPDPPPKDDEMETEQEKKEVPKCGFLPGNEKLLALLALVKPEVWTLKEKCILVITWIQHLIPKIEDGNDFGVAIQEKVLERVNAVKTKVEAFQTAISKYFSERGDAVAKASKDTHVMDYRALVHERDEAAYGALRAMVLDLRAFYAELHHIISSNLEKIVNPKGEEKPSMY

SEQ ID NO: 1264 - protein, 297 aa, Homo sapiens
MAAPQLFRALVSAQWVAEALKSPRASQPLKLLDASWYLPKLGRDARREFEERHIPGAAFFDIDRCSDHTSPYDHMLPSATHFADYAGSLGVSAATHVVIYDGSDQGLYSAPRVWWMFRAFGHHSVSLLDGGFRYWLSQNLPISSGKSPSEPAEFCAQLDPSFIKTHEDILENLDARRFQVVDARAAGRFQGTQPEPRDGIEPGHIPGSVNIPFTEFLTSEGLEKSPEEIQRLFQEKKVDLSKPLVATCGSGVTACHVVLGAFLCGKPDVPVYDGSWVEWYMRAQPEHVISQGRGKTL

SEQ ID NO: 1265 - protein, 145 aa, Homo sapiens
MVGRNSAIAAGLCGALFIGYCIYFDRKRRGDPNFKNRLRERRKKQKLAKERAGLSKLPDLKDAEAVQKFFLEEIQLGEELLAQGDYEKGVDHLTNAIAVCGQPQQLLQVLQQTLPPPVFQMLLTKLPTISQRIVSAQSLAEDDVE

SEQ ID NO: 1266 - protein, 530 aa, Homo sapiens; identical to SEQ ID NO: 1257

SEQ ID NO: 1267 - protein, 210 aa, Homo sapiens; identical to SEQ ID NO: 1170

SEQ ID NO: 1268 - protein, 1025 aa, Homo sapiens
MAGVLSRDAPDIESILALNPRIQAHATLRSTMAKKLDKKHWKRNTDKNCFICEKLENNFDDIKHTTLGERGALREAVRCLKCADAPCQKSCPTSLDIKSFITSIANKNYYGAAKLIFSDNPLGLTCGMVCPTSDLCVGGCNLHATEEGPINIGGLQQFATEVFKAMNIPQIRSPLLPPPEHMPEAYSAKIALFGAGPASISCASFLARLGYSDITIFEKQEYVGGLSTSEIPQFRLPYDVVNFEIELMKDLGVKIICGKSISTDEMTLSTLKENGYKAAFIGIGLPEPKKDHIFQGLTQVQGFYTSKDFLPLVAKGSKPGMCACHSPLPSVRGAVIVLGAGDTAFDCATSALRCGARRVFIVFRKGFANIRAVPEEMELAKEEKCEFLPFLSPRKVIVKDGKIVGMQFVRTEQDETGNWVEDEEQIVRLKADVVISPFGSVLDDPKVIEALSPIKFNRWGLPEVNPETMQTSEPWVFAGGDVVGMANTTVESVNDGKQASWYIHEYIQAQYGALVPSQPTLPLFYTPVDLVDISVEMAGLRFPNPFGLASATPATSTPMIRRAFEAGWGFALTKTFSLDKDIVTNVSPRIIRGTTSGPLYGPGQSSFLNIELISEKTAAYWCHSVTELKADFPDNILIASIMCSYNKNDWMELSKMAEASGADALELNLSCPHGMGERGMGLACGQDPELVRNICRWVRQSVRVPFFAKLTPNVTDIVSIARAAKEGGADGVTATNTVSGLMGLKADGSPWPSVGSGKRTTYGGVSGTTIRPIALRAVTAIARALPGFPILATGGIDSAESGLQFLHSGASVLQVCSAIQNQDFTVIEDYCTGLKALLYLKSIEELSDWDGQSPPTMSHQKGKPVPHIAELMGQKLPSFGPYLERRKKILAASKIRENDQNRACSPLQRKHFNSQKPIPAIKDVIGKSLQYLGTFGELNIMEQVVALIDEEMCINCGKCYMTCNDSGYQAIQFDPETHLPTVSDTCTGCTLCLSVCPIMDCIRMVSRATPYEPKRGLPLAVKPVC

SEQ ID NO: 1269 - protein, 1025 aa, Homo sapiens; identical to SEQ ID NO: 1268

SEQ ID NO: 1270 - protein, 620 aa, Homo sapiens
MLPVLYTGLAGLLLLPLLLTCCCPYLLQDVRFFLQLANMARQVRSYRQRRPVRTILHVFLEQARKTPHKPFLLFRDETLTYAQVDRRSNQVARALHDHLGLRQGDCVALFMGNEPAYVWLWLGLLKLGCPMACLNYNIRAKSLLHCFQCCGAKVLLASPELHEAVEEVLPTLKKEGVSVFYVSRTSNTNGVDTVLDKVDGVSADPIPESWRSEVTFTTPAVYIYTSGTTGLPKAATINHHRLWYGTSLALRSGIKAHDVIYTTMPLYHSAALMIGLHGCIVVGATFALRSKFSASQFWDDCRKYNATVIQYIGELLRYLCNTPQKPNDRDHKVKIALGNGLRGDVWREFIKRFGDIHIYEFYASTEGNIGFMNYPRKIGAVGRENYLQKKVVRHELIKYDVEKDEPVRDANGYCIKVPKGEVGLLICKITELTPFFGYAGGKTQTEKKKLRDVFKKGDVYFNSGDLLMIDRENFIYFHDRVGDTFRWKGENVATTEVADIVGLVDFVEEVNVYGVPVPGHEGRIGMASIKMKENYEFNGKKLFQHISEYLPSYSRPRFLRIQDTIEITGTFKHRKVTLMEEGFNPSVIKDTLYFMDDTEKTYVPMTEDIYNAIIDKTLKL

SEQ ID NO: 1271 - protein, 1541 aa, Homo sapiens
MDKFCNSTFWDLSLLESPEADLPLCFEQTVLVWIPLGFLWLLAPWQLYSVYRSRTKRSSITKFYLAKQVFVVFLLILAAIDLSLALTEDTGQATVPPVRYTNPILYLCTWLLVLAVQHSRQWCVRKNSWFLSLFWILSVLCGVFQFQTLIRALLKDSKSNMAYSYLFFVSYGFQIVLLILTAFSGPSDSTQTPSVTASFLSSITFSWYDRTVLKGYKHPLTLEDVWDIDEGFKTRSVTSKFEAAMTKDLQKARQAFQRRLQKSQRKPEATLHGLNKKQSQSQDVLVLEEAKKKSEKTTKDYPKSWLIKSLFKTFHVVILKSFILKLIHDLLVFLNPQLLKLLIGFVKSSNSYVWFGYICAILMFAVTLIQSFCLQSYFQHCFVLGMCVRTTVMSSIYKKALTLSNLARKQYTIGETVNLMSVDSQKLMDATNYMQLVWSSVIQITLSIFFLWRELGPSILAGVGVMVLLIPVNGVLATKIRNIQVQNMKNKDKRLKIMNEILSGIKILKYFAWEPSFQEQVQGIRKKELKNLLRFGQLQSLLIFILQITPILVSVVTFSVYVLVDSANVLNAEKAFTSITLFNILRFPLSMLPMVTSSILQASVSVDRLERYLGGDDLDTSAIRRVSNFDKAVKFSEASFTWDPDLEATIQDVNLDIKPGQLVAVVGTVGSGKSSLVSAMLGEMENVHGHITIQGSTAYVPQQSWIQNGTIKDNILFGSEYNEKKYQQVLKACALLPDLEILPGGDMAEIGEKGINLSGGQKQRVSLARAAYQDADIYILDDPLSAVDAHVGKHIFNKVVGPNGLLAGKTRIFVTHGIHFLPQVDEIVVLGKGTILEKGSYRDLLDKKGVFARNWKTFMKHSGPEGEATVNNDSEAEDDDDGLIPTMEEIPEDAASLAMRRENSLRRTLSRSSRSSSRRGKSLKNSLKIKNVNVLKEKEKEVEGQKLIKKEFVETGKVKFSIYLKYLQAVGWWSILFIILFYGLNNVAFIGSNLWLSAWTSDSDNLNGTNNSSSHRDMRIGVFGALGLAQGICLLISTLWSIYACRNASKALHGQLLTNILRAPMRFFDTTPTGRIVNRFSGDISTVDDLLPQTLRSWMMCFFGIAGTLVMICMATPVFAIIIIPLSILYISVQVFYVATSRQLRRLDSVTKSPIYSHFSETVTGLPIIRAFEHQQRFLAWNEKQIDINQKCVFSWITSNRWLAIRLELVGNLVVFCSALLLVIYRKTLTGDVVGFVLSNALNITQTLNWLVRMTSEAETNIVAVERISEYINVENEAPWVTDKRPPADWPRHGEIQFNNYQVRYRPELDLVLKGITCNIKSGEKVGVVGRTGAGKSSLTNCLFRILESAGGQIIIDGIDVASIGLHDLRERLTIIPQDPILFSGSLRMNLDPFNKYSDEEVWRALELAHLRSFVSGLQLGLLSEVTEGGDNLSIGQRQLLCLGRAVLRKSKILVLDEATAAVDLETDSLIQTTIRKEFSQCTVITIAHRLHTIMDSDKIMVLDNGKIVEYGSPEELLSNRGSFYLMAKEAGIENVNHTEL

SEQ ID NO: 1272 - protein, 322 aa, Homo sapiens
MAASRSLVPDRLRLPLCFLGVFVCYFYYGILQEKITRGKYGEGPKQETFTFALTLVFIQCVINAMFAKILIQFFDTARVDRTRTWLYAACSVSYVGAMVSSNSALQFVNYPTQVLGKSCKPIPVMLLGVTLLKKKYPLAKYLCVLLIVAGVALFMYKPKKVVGIEEHTVGFGELLLLLSLTLDGLTGVSQDHMRAHYQTGSNHMMLNINLWSTVLLGAGILFTGELWEFLSFAERYPTIIYNILLFGLTSALGQSFIFMTVVYFGPLTCSIITTTRKFFTILASVILFANPISSMQWVGTVLVFLGLGLDAKFGKGTKKTSH

SEQ ID NO: 1273 - protein, 322 aa, Homo sapiens; identical to SEQ ID NO: 1272

SEQ ID NO: 1274 - protein, 448 aa, Homo sapiens
MKGFIDDANYSVGLLDEGTNLGNVIDNYVYEHTLTGKNAFFVGDLGKIVKKHSQWQNVVAQIKPFYMVKCNSTPAVLEILAALGTGFACSTKNEMALVQELGVSPENIIYTSPCKQASQIKYAAKVGVNIMTCDNEVELKKIARNHPNAKVLLHIATEDNIGGEDGNMKFGTTLKNCRHLLECAKELDVQIIGVKFHISSACKEYQVYVHALSDARCVFDMAGEFGFTMNMLDIGGGFTGTEIQLEEVNHVISPLLDIYFPEGSGIQIISEPGSYYVSSAFTLAVNIIAKKVVENDKLSSGVEKNGSDEPAFVYYMNDGVYGSFASKLSEDLNTVPEVHKKYKEDEPLFTSSLWGPSCDELDQIVESCLLPELSVGDWLIFDNMGADSLHGPSAFSDTQRPAIYFMMSLSDWYEMQDAGITSDAMMKNFFFAPSCIQLSQEDNFSTEA

SEQ ID NO: 1275 - protein, 699 aa, Homo sapiens; identical to SEQ ID NO: 1153

SEQ ID NO: 1276 - protein, 263 aa, Homo sapiens
MFRNQYDNDVTVWSPQGRIHQIEYAMEAVKQGSATVGLKSKTHAVLVALKRAQSELAAHQKKILHVDNHIGISIAGLTADARLLCNFMRQECLDSRFVFDRPLPVSRLVSLIGSKTQIPTQRYGRRPYGVGLLIAGYDDMGPHVFQTCPSANYFDCRAMSIGARSQSARTYLERHMSEFMQCNLDELVKHGLRALRETLPAEQDLTTKNVSIGIVGKDLEFTIYDDDDVSPFLDGLEERPQRKAQPSQAADEPAEKADEPMEH

SEQ ID NO: 1277 - protein, 462 aa, Homo sapiens
MGPWTHSLRAALLLVLLGVCTVSSDTPANCTYPDLLGTWVFQVGPRHPRSHINCSVMEPTEEKVVIHLKKLDTAYDEVGNSGYFTLIYNQGFEIVLNDYKWFAFFKYEVKGSRAISYCHETMTGWVHDVLGRNWACFVGKKMANHSEKVYVNVAHLGGLQEKYSERLYSHNHNFVKAINSVQKSWTATTYEEYEKLSIRDLIRRSGHSGRILRPKPAPITDEIQQQILSLPESWDWRNVRGINFVSPVRNQESCGSCYSFASLGMLEARIRILTNNSQTPILSPQEVVSCSPYAQGCDGGFPYLIAGKYAQDFGVVEENCFPYTATDAPCKPKENCLRYYSSEYYYVGGFYGGCNEALMKLELVKHGPMAVAFEVHDDFLHYHSGIYHHTGLSDPFNPFELTNHAVLLVGYGKDPVTGLDYWIVKNSWGSQWGESGYFRIRRGTDECAIESIAMAAIPIPKL

SEQ ID NO: 1278 - protein, 462 aa, Homo sapiens; identical to SEQ ID NO: 1277

SEQ ID NO: 1279 - protein, 524 aa, Homo sapiens
MPSVYGFPAFTSATELLLAVTTFCLGFWVVRVTRTWVPKGLKSPPGPWGLPFMGHVLTLGKNPHLSLTKLSQQYGDVLQIRIGSTPVVVLSGLNTIKQALVKQGDDFKGRPDLYSFTLIANGQSMTFNPDSGPLWAARRRLAQNALKSFSIASDPTLASSCYLEEHVSKEAEYLISKFQKLMAEVGHFDPFKYLVVSVANVICAICFGRRYDHDDQELLSIVNLSNEFGEVTGSGYPADFIPILRYLPNSSLDAFKDLNKKFYSFMKKLIKEHYRTFEKGHIRDITDSLIEHCQDRRLDENANVQLSDDKVITIVFDLFGAGFDTITTAISWSLMYLVTNPRIQRKIQEELDTVIGRDRQPRLSDRPQLPYLEAFILETFRHSSFVPFTIPHSTIRDTSLNGFYIPKGHCVFVNQWQVNHDQELWGDPNEFRPERFLTSSGTLDKHLSEKVILFGLGKRKCIGETIGRLEVFLFLAILLQQMEFNVSPGEKVDMTPAYGLTLKHARCEHFQVQMRSSGPQHLQA

SEQ ID NO: 1280 - protein, 149 aa, Homo sapiens [sequence omitted]

SEQ ID NO: 1281 - protein, 241 aa, Homo sapiens
MEKPRGVRCTNGFPERELPRPGASRPAEKSRPPEAKGAQPADAWKAGRPRSEEDNELNLPNLAAAYSSILRSLGEDPQRQGLLKTPWRAATAMQFFTKGYQETISDVLNDAIFDEDHDEMVIVKDIDMFSMCEHHLVPFVGRVHIGYLPNKQVLGLSKLARIVEIYSRRLQVQERLTKQIAVAITEALQPAGVGVVIEATHMCMVMRGVQKMNSKTVTSTMLGVFREDPKTREEFLTLIRS

SEQ ID NO: 1282 - protein, 451 aa, Homo sapiens; identical to SEQ ID NO: 1141

SEQ ID NO: 1283 - protein, 101 aa, Homo sapiens
MQPRMLLIVALVALLASARADEGEGSLLLGSMQGYMEQASKTVQDALSSMQESDIAVVASRGWMDNRFKSLKGYWSKFTDKFTGLWESGPEDQLTTPTLEP

SEQ ID NO: 1284 - protein, 259 aa, Homo sapiens
MKAAVLAVALVFLTGCQAWEFWQQDEPQSQWDRVKDFATVYVDAVKDSGRDYVSQFESSTLGKQLNLNLLDNWDTLGSTVGRLQEQLGPVTQEFWANLEKETDWLRNEMNKDLENVKQKMQPHLDEFQEKWNEEVEAYRQKLEPLGTELHKNAKEMQRHLKVVAEEFRDRMRVNADALRAKFGLYSDQMRENLAQRLTEIKNHPTLIEYHTKASDHLKTLGEKAKPALDDLGQGLMPVLEAWKAKIMSMIDEAKKKLNA

SEQ ID NO: 1285 - protein, 530 aa, Homo sapiens; identical to SEQ ID NO: 1257

SEQ ID NO: 1286 - protein, 274 aa, Homo sapiens
MAVRRALIVLAHAERTSFNYAMKEAAVEALKKKGWEVVESDLYAMNFNPLISRNDITGEPKDSENFQYPVESSLAYKEGRLSPDIVAEQKKLEAADLVIFQFPLYWFGVPAILKGWFERVLVAGFAYTYATMYDKGPFQNKKTLLSITTGGSGSMYSLQGVHGDMNVILWPIQSGILRFCGFQVLEPQLVYSIGHTPPDARVQVLEGWKKRLETVWEESPLYFAPSSLFDLNFQAGFLLKKEVQEEQKKNKFGLSVGHHLGKSIPADNQIKARK

SEQ ID NO: 1287 - protein, 441 aa, Homo sapiens
SAAKIWRPSRGLRQAALLLLGRPGARGLARFHPSRQQQQQFPSLDDKPQFPGASAEFVDKLEFIQPNVISGIPIYRVMDRQGQIINPSEDPHLPQEEVLKLYRSMTLLNTMDRILYESQRQGRISFYMTNYGEEGTHVGSAAALERTDLVFGQYREAGVLMYRDYPLELFMAQCYGNVSDPGKGRQMPVHYGCKERHFVTISSPLATQIPQAVGAAYAAKRANANQIVICYFGEGAASEGDAHAGFNFAATLECPIIFFCRNNGYAISTPTSEQYRGDGIAARGPGYGIMSIRVDGNDVFAVYNATKEARRRAVAENQPFLIEAMTYRIGHHSTSDDSSAYRSVDEVNYWDKQDHPISRLRQYLLNQGWWDEEQEKAWRKQSRKKVMEAFEQAERKLKPNPSLLFSDVYQEMPAQLRRQQESLARHLQTYGEHYPLDHFDK

SEQ ID NO: 1288 - protein, 642 aa, Homo sapiens
METVVRRCPFLSRVPQAFLQKAGKSLLFYAQNCPKMMEVGAKPAPRTVSTSAAQCQQVKETPPANEKEKTAKAAVQQAPDESQMAQTPDGTQLPPGHPSPSTSQSSGSKCPFLAAQLSQTGSSVFRKASLELQEDVQEMHAVRKEVAQSPVLPSLVNAKRDGEGPSPLLKNFQDIMRKQRPERVSHLLQDNLPKSVSTFQYDHFFEKKIDEKKNDHTYRVFKTVNRRAQIFPMADDYTDSLITKKQVSVWCSNDYLGMSRHPRVCGAVIETVKQHGAGAGGTRNISGTSKFHVELEQELADLHGKDAALLFSSCFVANDSTLFTLAKMMPGCEIYSDSGNHASMIQGIRNSRVPKYIFRHNDVNHLRELLQRSDPSVPKIVAFETVHSMDGAVCPLEELCDVAHEFGAITFVDEVHAVGLYGASGGGIGDRDGVMPKMDIISGTLGKAFGCVGGYIASTSLLIDTVRSYAAGFIFTTSLPPMLLAGALESVRILKSNEGRALRRQHQRNVKLMRQMLMDAGLPVIHCPSHIIPVRVADAAKNTEICDELMTRHNIYVQAINYPTVPRGEELLRIAPTPHHTPQMMNFFLEKLLLTWKRVGLELKPHSSAECNFCRRPLHFEVMSEREKAYFSGMSKMVSAQA

SEQ ID NO: 1289 - protein, 642 aa, Homo sapiens; identical to SEQ ID NO: 1288

SEQ ID NO: 1290 - protein, 1448 aa, Homo sapiens
MWKNREAQLCLFSVLLAFLPSASLLFGNSKYMVLVPSQLYTETPEKICLHLYHLNETVTVTASLISQRGTRKLFDEPVVDKDLFHCVSFIPRLPSSEEEESLDINIEGAKHKFSKRHVVLVKNKESVVFVQTDKPMYKPGQSVKFRVVSMDKNLYPLKELVQDPKMNRIMQWQDVKTENGLKQLSFSLSAEPIQGPYKIVVLKQSGVKEEHSFTVMEFVLPRFGVDVKVPNAISVYDEIISVTACDRYTYGKPVLGRVKVRLCHGNPSFSSETKSACKEENSQLDNNGCSTQEVNITEFQLKENYLKVRQAFHVNATVTEEGTGMEFGGYGRIEVERTRNKFLFLKADSHFRHGIPFFVKVRLVDIKGDPIPNEQVFIKAQEAGYTNATTTDQHGLAKFSIDTSSISGYSLNIKVYHKEENLCIHSSCTAERHAEAHHTAYAVYSLSKSYIYLDTEAGVLPCNQIHTVQAHFILKGQVLGVLPQIVFHYLVMAQGSILQTGNHTHQVESGAPVQGNFALEIPVEFSMVPMAKMLIYTILPDGEVIADSVKFQVEKCLRNKVHLSFSPSQSLPASQTHMRVTASPQSLCGLRAVDQSVLLLRPEAELSPSLIYDLPGMQDSNFIPRSHHPFEDEDDCLMYQPRDTEELTYSVPYGREKDVYRYVDMGLTAFTNLKIKHPTYCYDLPKEPPRKDPPRKDPEPKDTVVETIRNYFPETWVWDLVTVSSSGVTEVEMTVPDTITEWKAGALCLSNDTGLGLSSVATLQAFQPFFVELTMPYSVIRGEAFTLKATVMNYLPTSLQMTVQLEASPDFTAVPVGNDQDSYCLGANGRHTSSWLVTPKSLGNVNFSVSVEAQQSPEPCGSEVATVPETGRKDTVIKVLIVEPEGIKKEHTFSSLLCASDAELSETLSLLLPPRVVKDSARAHFSVMGDILSSAIKNTQNLIQMPYGCGEQNMVLFAPNIYVLKYLNETQQLTENIKSKALGYLRAGYQRELNYKHKDGSYSAFGDHNGQGQGNTWLTAFVLKSFAQARAFIFIDESHITDAFTWLSKQQKDSGCFRSSGSLFNNAMKGGVDDEITLSAYITMALLESSLPPVVSKALGCLEASWETIEQGRNGSFVYTKALMAYAFTLAGNQEKRNEILKSLDKEAIKEDNSIHWERPQKPMKSEHYLYTPQASSVEVEMSAYVVLARLTAHPAPSPEDLALSTGTIKWLTKQQNSHGGFSSTQDTVVALDALSKYGAATFSKSQKTPSVTVQSSGSFSQKFQVDKSNRLLLQQVSLPDIPGNYTIRVSGEGCVYAQTTLRYNLPLEKQQPAFALKVKTVPLTCNNPKGQNSFQISLEISYTGSRPASNMVIADVKMLSGFIPLKPTVKKLERLEHVSRTEVTTNNVLLYLDQVTNQTLSFSFIIQQDIPVKNLQPAIVKVYDYYETDEVAFAEYSSPCSSDKQNV

SEQ ID NO: 1291 - protein, 292 aa, Homo sapiens
MEDSMDMDMSPLRPQNYLFGCELKADKDYHFKVDNDENEHQLSLRTVSLGAGAKDELHIVEAEAMNYEGSPIKVTLATLKMSVQPTVSLGGFEITPPVVLRLKCGSGPVHISGQHLVAVEEDAESEDEDEEDVKLLGMSGKRSAPGGGNKVPQKKVKLDEDDDEDDEDDEDDEDDDDDDFDEEETEEKVPVKKSVRDTPAKNAQKSNQNGKDLKPSTPRSKGQESFKKQEKTPKTPKGPSSVEDIKAKMQASIEKGGSLPKVEAKFINYVKNCFRMTDQEAIQDLWQWRKSL

SEQ ID NO: 1292 - protein, 413 aa, Homo sapiens
MAPPSFFAQVPQAPPVLVFKLIADFRDDPDPRKVNLGVGAYRTDDSQPWVLPVVTKVEQKIANDHSLNHEYLPILGLAEFRSCASQLVLGDNSPALRENGVGGVQSLGATGALRIGADFLARWYNGTDNKNTPVYVSSPTWENHNGVFSAAGFKDIRSYRYWDAEKRGLDLQGFLNDLENAPEFSIFVLHACAHNPTGTDPTEEEWKQIAAVMKRRFLFPFFDSAYQGFASGDLEKDAWAIRYFVSEGFELFCPQSFSKNFGLYNERVGNLTVVGKEHDSVLRVLSQMEKIVRITWSNPPAQGARIVATTLSNPELFKEWKGNVKTMADRILTMRSELRARLEALKTPGTWSHITEQIGMFSFTGLNPKQVEYLVNEKHIYLMPSGRINMCGLTTKNLDYVATSINEAVTKFQ

SEQ ID NO: 1293 - protein, 492 aa, Homo sapiens
MLDTGLLLVVILASLSVMFLVSLWQQKIRERLPPGPTPLPFIGNYLQLNMKDVYSSITQLSERYGPVFTIHLGPRRIVVLYGYDAVKEALVDQAEEFSGRGELPTFNILFKGYGFSLSNVEQAKRIRRFTIATLRDFGVGKRDVQECILEEAGYLIKTLQGTCGAPIDPSIYLSKTVSNVINSIVFGNRFDYEDKEFLSLLEMIDEMNIFAASATGQLYDMFHSVMKYLPGPQQQIIKVTQKLEDFMIEKVRQNHSTLDPNSPRNFIDSFLIRMQEEKYVNSEFHMNNLVMSSLGLLFAGTGSVSSTLYHGFLLLMKHPDVEAKVHEEIERVIGRNRQPQYEDHMKMPYTQAVINEIQRFSNLAPLGIPRRIIKNTTFRGFFLPKGTDVFPIIGSLMTEPKFFPNHKDFNPQHFLDDKGQLKKNAAFLPFSIGKRFCLGDSLAKMELFLLLTTILQNFRFKFPMNLEDINEYPSPIGFTRIIPNYTMSFMPI

SEQ ID NO: 1294 - protein, 507 aa, Homo sapiens
MNRAFCLLARSRRFPRVPSAGAVLSGEAATLPRCAPNVVRMASQNSFRIEYDTFGELKVPTDKYYGAQTVRSTMNFKIGGATERMPIPVIKAFGILKRAAAEVNQEYGLDPKIASAIMKAADEVAEGKLNDHFPLVVWQTGSGTQTNMNVNEVISNRAIEMLGGELGSKKPVHPNDHVNKSQSSNDTFPTAMHIAAALEVHQVLLPGLQKLHDALSAKSKEFAQVIKIGRTHTQDAVPLTLGQEFSGYVQQVQYAMERIKAAMPRIYELAAGGTAVGTGLNTRIGFAEKVAAKVAALTGLPFVTAPNKFEALAAHDALVELSGAMNTTACSLMKIANDIRFLGSGPRSGLGELILPENEPGSSIMPGKVNPTQCEAMTMVAAQVMGNHVAVTVGGSNGHFELNVFKPMMIKNVLHSARLLGDASVSFTENCVVGIQANTERINKLMNESLMLVTALNPHIGYDKAAKIAKTAHKNGSTLKKTAIELGYLTAEQFDEWVKPKDMLGPK

SEQ ID NO: 1295 - protein, 461 aa, Homo sapiens
MGSFTKEEFDCHILDEGFTAKDILDQKINEVSSSDDKDAFYVADLGDVLKKHLRWLKALPRVTPFYAVKCNDSRAIVSTLAAIGTGFDCASKTEIQLVQGLGVPPERIIYANPCKQVSQIKYAASNGVQMMTFDSEIELMKVARAHPKAKLVLRIATDDSKAVCRLSVKFGATLKTSRLLLERAKELNIDVIGVSFHVGSGCTDPETFVQAVSDARCVFDMGTEVGFSMYLLDIGGGFPGSEDTKLKFEEITSVINPALDKYFPSDSGVRIIAEPGRYYVASAFTLAVNIIAKKTVWKEQTGSDDEDESNEQTLMYYVNDGVYGSFNCILYDHAHVKALLQKRPKPDEKYYSSSIWGPTCDGLDRIVERCSLPEMHVGDWMLFENMGAYTVAAASTFNGFQRPNIYYVMSRSMWQLMKQIQSHGFPPEVEEQDVGTLPMSCAQESGMDRHPAACASASINV

SEQ ID NO: 1296 - protein, 461 aa, Homo sapiens; identical to SEQ ID NO: 1295

SEQ ID NO: 1297 - protein, 292 aa, Homo sapiens; identical to SEQ ID NO: 1291

SEQ ID NO: 1298 - protein, 259 aa, Homo sapiens
MVPLMELDELCLLDMLVYLEGFMAFVSIVGLRSVGSPYGRYSPQWPGIRVPARPAWFIQELPSMAWPLYEYIRPAAARLGNLPNRVLLAMFLIHYVQRTLVFPVLIRGGKPTLLVTFVLAFLFCTFNGYVQSRYLSQFAVYAEDWVTHPCFLTGFALWLVGMVINIHSDHILRNLRKPGETGYKIPRGGLFEYVSAANYFGELVEWCGFALASWSLQGVVFALFTLSTLLTRAKQHHQWYHEKFEDYPKSRKILIPFVL

SEQ ID NO: 1299 - protein, 259 aa, Homo sapiens; identical to SEQ ID NO: 1298

SEQ ID NO: 1300 - protein, 530 aa, Homo sapiens; identical to SEQ ID NO: 1257

SEQ ID NO: 1301 - protein, 1100 aa, Homo sapiens
MSAKAISEQTGKELLYKYICTTSAIQNRFKYARVTPDTDWAHLLQDHPWLLSQSLVVKPDQLIKRRGKLGLVGVNLSLDGVKSWLKPRLGHEATVGKAKGFLKNFLIEPFVPHSQAEEFYVCIYATREGDYVLFHHEGGVDVGDVDTKAQKLLVGVDEKLNAEDIKRHLLVHAPEDKKEILASFISGLFNFYEDLYFTYLEINPLVVTKDGVYILDLAAKVDATADYICKVKWGDIEFPPPFGREAYPEEAYIADLDAKSGASLKLTLLNPKGRIWTMVAGGGASVVYSDTICDLGGVNELANYGEYSGAPSEQQTYDYAKTILSLMTREKHPDGKILIIGGSIANFTNVAATFKGIVRAIRDYQGSLKEHEVTIFVRRGGPNYQEGLRVMGEVGKTTGIPIHVFGTETHMTAIVGMAWAPAIPNQPPTAAHTANFLLNASGSTSTPAPSRTASFSESRADEVAPAKKAKPAMPQDSVPSPRSLQGKSATLFSRHTKAIVWGMQTRAVQGMLDFDYVCSRDEPSVAAMVYPFTGDHKQKFYWGHKEILIPVFKNMADAMKKHPEVDVLINFASLRSAYDSTMETMNYAQIRTIAIIAEGIPEALTRKLIKKADQKGVTIIGPATVGGIKPGCFKIGNTGGMLDNILASKLYRPGSVAYVSRSGGMSNELNNIISRTTDGVYEGVAIGGDRYPGSTFMDHVLRYQDTPGVKMIVVLGEIGGTEEYKICRGIKEGRLTKPVVCWCIGTCATMFSSEVQFGHAGACANQASETAVAKNQALKEAGVFVPRSFDELGEIIQSVYEDLVAKGAIVPAQEVPPPTVPMDYSWARELGLIRKPASFMTSICDERGQELIYAGMPITEVFKEEMGIGGVLGLLWFQRRLPKYSCQFIEMCLMVTADHGPAVSGAHNTIICARAGKDLVSSLTSGLLTIGDRFGGALDAAAKMFSKAFDSGIIPMEFVNKMKKEGKLIMGIGHRVKSINNPDMRVQILKDFVKQHFPATPLLDYALEVEKITTSKKPNLILNVDGFIGVAFVDMLRNCGSFTREEADEYVDIGALNGVFVLGRSMGFIGHYLDQKRLKQGLYRHPWDDISYVLPEHMSM

SEQ ID NO: 1302 - protein, 1100 aa, Homo sapiens; identical to SEQ ID NO: 1301

SEQ ID NO: 1303 - protein, 492 aa, Homo sapiens
MEFGVLLLLTLTVGFLLFLVSQSQPKTHGHLPPGPRPLPFLGNLLQMNRRGFLNSFMQLQEKYGDVFTVHLGPRPVVILCGTDTIREALVDQAEAFSGRGTVAVLHPVVQGYGVIFATGERWKTLRRFSLVTMKEFGMGKRSVDERIKEEAQCLVEELKKYKGAPLNPTFLFQSIAANTICSIVFGERFDYKDHQFLHLLDLVYKTSVLMGSLSSQVFELYSGFLKYFPGAHKQIFKNLQEMLNYIGHIVEKHRATLDPSAPRDFIDTYLLRMEKEKSNHHTEFNHQNLVISVLSLFFAGTETTSTTLRCTFLIMLKYPHVAEKVQKEIDQVIGSHRLPTPDDRTKMPYTDAVIHEIQRFADLTPIGLPHRVTKDTVFRGYLLPKNTEVYPILSSALHDPRYFEQPDTFNPEHFLDANGALKKSEAFLPFSTGKRICLGEGIARNELFIFFTAILQNFTLASPVAPEDIDLTPINIGVGKIPSPYQINFLSR

SEQ ID NO: 1304 - protein, 221 aa, Homo sapiens
MPGKPVLHYFDGRGRMEPIRWLLAAAGVEFEEQFLKTRDDLARLRNDGSLMFQQVPMVEIDGMKLVQTRAILNYIATKYNLYGKDMKERALIDMYAEGVADLDEIVLHYPYIPPGEKEASLAKIKDKARNRYFPAFEKVLKSHGQDYLVGNRLSRADVYLVQVLYHVEELDPSALANFPLLKALRTRVSNLPTVKKFLQPGSQRKPLEDEKCVESAVKIFS

SEQ ID NO: 1305 - protein, 430 aa, Homo sapiens
MKLITILLLCSRLLPSLAQEEGAQELNCNDETVFQAVDTALKKYNAELESGNQFVLYRVTKGTKKDGAETLYSFKYQIKEGNCSVQSGLTWQDCDFKDAEEAATGECTTTLGKKENKFSVATQICNITPGKGPKKTEEDLCVGCFQPIPMDSSDLKPVLKHAVEHSNNNTKHTHLFALREVKSAHSQVVAGMNYKIIYSIVQTNCSKEDFPSLREDCVPLPYGDHGECTGHTHVDIHNTIAGFSQSCDLYPGDDLFELLPKNCRGCPREIPVDSPELKEALGHSIAQLNAQHNHIFYFKIDTVKKATSQVVAGVIYVIEFIARETNCSKQSKTELTADCETKHLGQSLNCNANVYMRPWENKVVPTVRCQALDMMISRPPGFSPFRLVRVQETKEGTTRLLNSCEYKGRLSKARAGPAPDHQAEASTVTS

SEQ ID NO: 1306 - protein, 354 aa, Homo sapiens
MLSNLRILLNKAALRKAHTSMVRNFRYGKPVQSQVQLKGRDLLTLKNFTGEEIQYMLWLSADLKFRIKQKGEYLPLLQGKSLGMIFEKRSTRTRLSTETGFALLGGHPSFLTTQDIHLGVNESLTDTARVLSSMTDAVLARVYKQSDLDILAKEATIPIVNGLSDLYHPIQILADYLTLQEHYGSLKGLTLSWIGDGNNILHSIMMSAAKFGMHLQAATPKGYEPDPNIVKLAEQYAKENGTRLSMTNDPLEAARGGNVLITDTWISMGQEDEKKKRLQAFQGYQVTMKTAKVAASDWTFLHCLPRKPEEVDDEVFYSPRSLVFPEAENRKWTIMAVMVSLLTDYSPVLQKPKF

SEQ ID NO: 1307 - protein, 2477 aa, Homo sapiens
MLRGPGPGRLLLLAVLCLGTSVRCTETGKSKRQAQQIVQPPSPVAVSQSKPGCFDNGKHYQINQQWERTYLGNALVCTCYGGSRGFNCESKPEPEETCFDKYTGNTYKVGDTYERPKDSMIWDCTCIGAGRGRISCTIANRCHEGGQSYKIGDKWRRPHETGGYMLECLCLGNGKGEWTCKPIAEKCFDHAAGTSYVVGETWEKPYQGWMMVDCTCLGEGNGRITCTSRNRCNDQDTRTSYRIGDTWSKKDNRGNLLQCVCTGNGRGEWKCERHVLQSASAGSGSFTDVRTAIYQPQTHPQPAPYGHCVTDSGVVYSVGMQWLKSQGDKQMLCTCLGNGVSCQETAVTQTYGGNSNGEPCVLPFHYNGRTFYSCTTEGRQDGHLWCSTTSNYEQDQKYSFCTDHAVLVQTRGGNSNGALCHFPFLYSNRNYSDCTSEGRRDNMKWCGTTQNYDADQKFGFCPMAAHEEICTTNEGVMYRIGDQWDKQHDLGHMMRCTCVGNGRGQWACIPYSQLRDQCIVDDITYNVNDTFHKRHEEGHMLNCTCFGQGRGRWKCDPIDRCQDSETRTFYQIGDSWEKFVHGVRYQCYCYGRGIGEWHCQPLQTYPGTTGPVQVIITETPSQPNSHPIQWNAPEPSHITKYILRWRPKTSTGRWKEATIPGHLNSYTIKGLTPGVIYEGQLISIQQYGHQEVTRFDFTTSASTPVTSNTVTGETAPFSPVVATSESVTEITASSFVVSWVSASDTVSGFRVEYELSEEGDEPQYLDLPSTATSVNIPDLLPGRKYIVNVYQISEEGKQSLILSTSQTTAPDAPPDPTVDQVDDTSIVVRWSRPQAPITGYRIVYSPSVEGSSTELNLPETANSVTLSDLQPGVQYNITIYAVEENQESTPVFIQQETTGVPRSDDVPAPKDLQFVEVTDVKVTIMWTPPNSAVTGYRVDVLPVNLPGEHGQRLPVNRNTFAEVTGLSPGVTYLFKVFAVHQGRESKPLTAQQTTKLDAPTNLQFVNETDRTVLVTWTPPRARIAGYRLTVGLTRGGQPKQYNVGPMASKYPLRNLQPGSEYTVTLMAVKGNQQSPKATGVFTTLQPLRSIPPYNTEVTETTIVITWTPAPRIGFKLGVRPSQGGEAPREVTSDSGSIVVSGLTPGVEYTYTIQVLRDGQERDAPIVNRVVTPLSPPTNLHLEANPDTGVLTVSWERSTTPDITGYRITTTPTNGQQGTALEEVVHADQSSCTFENRNPGLEYNVSVYTVKDDKESAPISDTVIPEVPQLTDLSFVDITDSSIGLRWTPLNSSTIIGYRITVVAAGEGIPIFEDFVDSSVGYYTVTGLEPGIDYDISVITLINGGESAPTTLTQQTAVPPPTDLRFTNIGPDTMRVTWAPPPSIELTNLLVRYSPVKNEEDVAELSISPSDNAVVLTNLLPGTEYLVSVSSVYEQHESIPLRGRQKTGLDSPTGFDSSDVTANSFTVHWVAPRAPITGYIIRHHAEHSAGRPRQDRVPPSRNSITLTNLNPGTEYIVTIIAVNGREESPPLIGQQSTVSDVPRDLEVIASTPTSLLISWEPPAVSVRYYRITYGETGGNSPVQEFTVPGSKSTATINNIKPGADYTITLYAVTGRGDSPASSKPVSINYQTEIDKPSQMQVTDVQDNSISVRWLPSTSPVTGYRVTTAPKNGLGPTKSQTVSPDQTEMTIEGLQPTVEYVVSVYAQNRNGESQPLVQTAVTNIDRPKGLAFTDVDVDSIKIAWESPQGQVSRYRVTYSSPEDGIHELFPAPDGDEDTAELHGLRPGSEYTVSVVALHGGMESQPLIGVQSTAIPAPTNLKFTQVSPTTLTAQWTAPSVKLTGYRVRVTPKEKTGPMKEINLSPDSTSVIVSGLMVATKYEVSVYALKDTLTSRPAQGVVTTLENVSPPRRARVTDATETTITISWRTKTETITGFQVDAIPANGQTPVQRTISPDVRSYTITGLQPGTDYKIHLYTLNDNARSSPVVIDASTAIDAPSNLRFLTTTPNSLLVSWQAPRARITGYIIKYEKPGSPPREVVPRPRPGVTEATITGLEPGTEYTIYVIALKNNQKSEPLIGRKKTDELPQLVTLPHPNLHGPEILDVPSTVQKTPFVTNPGYDTENGIQLPGTSHQQPSVGQQMIFEEHGFRRTTPPTAATPVRLRPRPYLPNVDEEVQIGHVPRGDVDYHLYPHVPGLNPNASTGQEALSQTTISWTPFQESSEYIISCQPVGTDEEPLQFQVPGTSTSATLTGLTRGVTYNIIVEALHNQRRHKVREEVVTVGNTVNEGLNQPTDDSCFDPYTVSHYAVGEEWERLSDSGFKLTCQCLGFGSGHFRCDSSKWCHDNGVNYKIGEKWDRQGENGQRMSCTCLGNGKGEFKCDPHEATCYDDGKTYHVGEQWQKEYLGAICSCTCFGGQRGWRCDNCRRPGAAEPSPDGTTGHTYNQYTQRYHQRTNTNVNCPIECFMPLDVQADRDDSRE

SEQ ID NO: 1308 - protein, 229 aa, Homo sapiens [sequence omitted]

SEQ ID NO: 1309 - protein, 773 aa, Homo sapiens
MAEAHQAVAFQFTVTPDGIDLRLSHEALKQICLSGLHSWKKKFIRFKNGIITGVFPANPSSWLIVVVGVISSMHAKVDPSLGMIAKISRTLDTTGRMSSQTKNIVSGVLFGTGLWVAVIMTMRYSLKVLLSYHGWMFAEHGKMSRSTKIWMAMVKVLSGRKPMLYSFQTSLPRLPVPAVKDTVSRYLESVRPLMKEEDFQRMTALAQDFAVNLGPKLQWYLKLKSWWATNYVSDWWEEYIYLRGRGPLMVNSNYYAMEMLYITPTHIQAARAGNTIHAILLYRRTLDREELKPIRLLGSTIPLCSAQWERLFNTSRIPGEETDTIQHIKDSRHIVVYHRGRYFKVWLYHDGRLLRPRELEQQMQQILDDPSEPQPGEAKLAALTAADRVPWAKCRQTYFARGKNKQSLDAVEKAAFFVTLDESEQGYREEDPEASIDSYAKSLLHGRCFDRWFDKSITFVVFKNSKIGINAEHSWADAPIVGHLWEYVMATDVFQLGYSEDGHCKGDTNPNIPKPTRLQWDIPGECQEVIDASLSSASLLANDVDLHSFPFDSFGKGLIKKCRTSPDAFIQLALQLAHYKDMGKFCLTYEASMTRLFREGRTETVRSCTMESCNFVQAMMDPKSTAEQRLKLFKIACEKHQHLYRLAMTGAGIDRHLFCLYVVSKYLAVDSPFLKEVLSEPWRLSTSQTPQQQVELFDFEKNPDYVSCGGGFGPVADDGYGVSYIIVGENFIHFHISSKFSSPETDSHRFGKHLRQAMMDIITLFGLTINSKK

SEQ ID NO: 1310 - protein, 179 aa, Homo sapiens
MLSLDFLDDVRRMNKRQLYYQVLNFGMIVSSALMIWKGLMLITGSESPIVVVLSGSMEPAFHRGDLLFLTNRVEDPIRVGEIVVFRIEGREIPIVHRVLKIHEKQDGHIKFLTKGDNNAVDDRGLYKQGQHWLEKKDVVGRARGFVPYIGIVTILMNDYPKFSYAVLFLLGLFVLVHRE

SEQ ID NO: 1311 - protein, 179 aa, Homo sapiens; identical to SEQ ID NO: 1310

SEQ ID NO: 1312 - protein, 199 aa, Homo sapiens
MSWLLGYVDPTEPSFVAAVLTIVFNPLFWNVVARWEQRTRKLSRAFGSPYLACYSLGSIILLLNILRSHCFTQAMMSQPKMEGLDSHTIYFLGLALLGWGLVFVLSSFYALGFTGTFLGDYFGILKESRVTTFPFSVLDNPMYWGSTANYLGWALMHASPTGLLLTVLVALVYVVALLFEEPFTAEIYRRKATRLHKRS

SEQ ID NO: 1313 - protein, 197 aa, Homo sapiens
MMFPQSRHSGSSHLPQQLKFTTSDSCDRIKDEFQLLQAQYHSLKLECDKLASEKSEMQRHYVMYYEMSYGLNIEMHKQAEIVKRLNGICAQVLPYLSQEHQQQVLGAIERAKQVTAPELNSIIRQQLQAHQLSQLQALALPLTPLPVGLQPPSLPAVSAGTGLLSLSALGSQTHLSKEDKNGHDGDTHQEDDGEKSD

SEQ ID NO: 1314 - protein, 197 aa, Homo sapiens; identical to SEQ ID NO: 1313

SEQ ID NO: 1315 - protein, 286 aa, Homo sapiens
MWLRSYRITFSCLTRLKTYRSSWKKLYSTSQTVDSKEVKTFQALAHSWWDEQGKFAPLHSMNDLRVPFIRDNLLKTSTNHDPGKPLSGMKILDVGCGGGLLTEPLGRLGASVVGIDPVAENIKIAQHHKSFDPVLDKRIQYRVCSLEETLNENAECFDAVVASEVVEHVNNLEMFIQCCYQVLKPGGSLFITTVNKTQLSYVLGIVFSEQIAGIVPKGTHTWEKFVSPEKLESILEPNGLSVETVAGMVYNPFSGYWHWTENTSLNYAAHAVRARAQEHLEPAESA

SEQ ID NO: 1316 - protein, 290 aa, Homo sapiens
MRDRLPDLTACRKSDDGDNAVIITVEKDHFMDAFFHQVEEIRSSIARIAQHVEDVKKNHSIILSAPNPEGKIKEELEDLNKEIKKTANRIRGKLKAIEQSCDQDENGNRTSVDLRIRRTQHSVLSRKFVDVMTEYNEAQILFRERSKGRIQRQLEITGRTTTDEELEEMLESGKPSIFISDIISDSQITRQALNEIESRHKDIMKLETSIRELHEMFMDMAMFVETQGEMVNNIERNVVNSVDYVEHAKEETKKAIKYQSKARRKKWIIAAVVVAVIAVLALIIGLTVGK

SEQ ID NO: 1317 - protein, 504 aa, Homo sapiens
MDLLSALTLETWVLLAVVLVLLYGFGTRTHGLFKKQGIPGPKPLPFFGTVLNYYMGLWKFDVECHKKYGKIWGLFDGQMPLFAITDTEMIKNVLVKECFSVFTNRRDFGPVGIMGKAVSVAKDEEWKRYRALLSPTFTSGRLKEMFPIIEQYGDILVKYLKQEAETGKPVTMKKVFGAYSMDVITSTSFGVNVDSLNNPKDPFVEKTKKLLRFDFFDPLFLSVVLFPFLTPIYEMLNICMFPKDSIEFFKKFVYRMKETRLDSVQKHRVDFLQLMMNAHNDSKDKESHTALSDMEITAQSIIFIFAGYEPTSSTLSFVLHSLATHPDTQKKLQEEIDRALPNKAPPTYDTVMEMEYLDMVLNETLRLYPIGNRLERVCKKDVEINGVFMPKGSVVMIPSYALHRDPQHWPEPEEFRPERFSKENKGSIDPYVYLPFGNGPRNCIGMRFALMNMKLALTKVLQNFSFQPCKETQIPLKLSRQGLLQPTKPIILKVVPRDEIITGS

SEQ ID NO: 1318 - protein, 504 aa, Homo sapiens; identical to SEQ ID NO: 1317

SEQ ID NO: 1319 - protein, 171 aa, Homo sapiens
MHPFYTRAATMIGEIAAAVSFISKFLRTKGLTSERQLQTFSQSLQELLAEHYKHHWFPEKPCKGSGYRCIRINHKMDPLIGQAAQRIGLSSQELFRLLPSELTLWVDPYEVSYRIGEDGSICVLYEASPAGGSSQNSTNVQMVDSRISCKEELLLGRTSPSKNYNMMTVSG

SEQ ID NO: 1320 - protein, 171 aa, Homo sapiens; identical to SEQ ID NO: 1319

SEQ ID NO: 1321 - protein, 1100 aa, Homo sapiens; identical to SEQ ID NO: 1301

SEQ ID NO: 1322 - protein, 481 aa, Homo sapiens
MKSATGPLLPTLLGLLLLSIPRTQGVNPAMVVRITDKGLEYAAKEGLLSLQRELYKITLPDFSGDFKIKAVGRGQYEFHSLEIQSCQLRGSSLKPLPGRGLSLSISDSSISVRGKWKVRRSFVKLHGSFDLDVKSVTISVDLLLGVDPSERPTVTASGCSNRIRDLELHVSGNVGWLLNLFHNQIESKLQKVLESKICEMIQKSVTSDLQPYLQTLPVTADIDTILGIDYSLVAAPQAKAQTLDVMFKGEIFNRNHRSPVTTPTPTMSLPEDSKQMVYFAISDQAFNIATRVYHQAGYLNFTITDDMLPPDSNIRLNTKAFRPFTPLITRKYPDMNLELLGTVVSAPLLNVSPGNLSLAPQMEIEGFVILPSSARESVFRLGVVTNVFVSLTFDNSKVTGMLHPEKAQVRLIESKVGMFNVNLFQAFLNYYLLNSLYPDVNDELAKGFPLPLPRRIKLHDLDFQIHKNFLYLGANVQYMRV

SEQ ID NO: 1323 - protein, 1059 aa, Homo sapiens; identical to SEQ ID NO: 1108

SEQ ID NO: 1324 - protein, 1581 aa, Homo sapiens
MPLAFCGTENHSAAYRVDQGVLNNGCFVDALNVVPHVFLLFITFPILFIGWGSQSSKVHIHHSTWLHFPGHNLRWILTFILLFVLVCEIAEGILSDGVTESRHLHLYMPAGMAFMAAITSVVYYHNIETSNFPKLLIALLIYWTLAFITKTIKFVKFYDHAIGFSQLRFCLTGLLVILYGMLLLVEVNVIRVRRYVFFKTPREVKPPEDLQDLGVRFLQPFVNLLSKGTYWWMNAFIKTAHKKPIDLRAIGKLPIAMRALTNYQRLCLAFDAQARKDTQSQQGARAIWRALCHAFGRRLVLSSTFRILADLLGFAGPLCIFGIVDHLGKENHVFQPKTQFLGVYFVSSQEFLGNAYVLAVLLFLALLLQRTFLQASYYVAIETGINLRGAIQTKIYNKIMHLSTSNLSMGEMTAGQICNLVAIDTNQLMWFFFLCPNLWAMPVQIIVGVILLYYILGVSALIGAAVIILLAPVQYFVATKLSQAQRTTLEYSNERLKQTNEMLRGIKLLKLYAWENIFCSRVEKTRRKEMTSLRAFAVYTSISIFMNTAIPIAAVLITFVGHVSFFKESDFSPSVAFASLSLFHILVTPLFLLSSVVRSTVKALVSVQKLSEFLSSAEIREEQCAPREPAPQGQAGKYQAVPLKVVNRKRPAREEVRDLLGPLQRLTPSTDGDADNFCVQIIGGFFTWTPDGIPTLSNITIRIPRGQLTMIVGQVGCGKSSLLLATLGEMQKVSGAVFWNSLPDSEGEDPSNPERETAADSDARSRGPVAYASQKPWLLNATVEENITFESPFNKQRYKMVIEACSLQPDIDILPHGDQTQIGERGINLSGGQRPGISVARALYQHTNVVFLDDPFSALDVHLSDHLMQAGILELLRDDKRTVVLVTHKLQYLPHADWIIAMKDGTIQREGTLKDFQRSECQLFEHWKTLMNRQDQELEKETVMERKAPEPSQGLPRAMSSRDGLLLDEDEEEEEAAESEEDDNLSSVLHQRAKIPWRACTKYLSSAGILLLSLLVFSQLLKHMVLVAIDYWLAKWTDSALVLSPAARNCSLSQECALDQSVYAMVFTVLCSLGIALCLVTSVTVEWTGLKVAKRLHRSLLNRIILAPMRFFETTPLGSILNRFSSDCNTIDQHIPSTLECLSRSTLLCVSALAVISYVTPVFLVALLPLAVVCYFIQKYFRVASRDLQQLDDTTQLPLLSHFAETVEGLTTIRAFRYEARFQQKLLEYTDSNNIASLFLTAANRWLEVRMEYIGACVVLIAAATSISNSLHRELSAGLVGLGLTYALMVSNYLNWMVRNLADMEIQLGAVKGIHTLLKTEAESYEGLLAPSLIPKNWPDQGKIQIQNLSVRYDSSLKPVLKHVNALISPGQKIGICGRTGSGKSSFSLAFFRMVDMFEGRIIIDGIDIAKLPLHTLRSRLSIILQDPVLFSGTIRFNLDPEKKCSDSTLWEALEIAQLKLVVKALPGGLDAIITEGGENFSQGQRQLFCLARAFVRKTSIFIMDEATASIDMATENILQKVVMTAFADRTVVTIAHRVHTILSADLVMVLKRGAILEFDKPEKLLSQKDSVFASFVRADK

SEQ ID NO: 1325 - protein, 259 aa, Homo sapiens; identical to SEQ ID NO: 1284

SEQ ID NO: 1326 - protein, 391 aa, Homo sapiens
MFLKAVVLTVALVAITGTQAEVTSDQVANVMWDYFTQLSNNAKEAVEQLQKTDVTQQLNTLFQDKLGNINTYADDLQNKLVPFAVQLSGHLTKETERVREEIQKELEDLRANMMPHANKVSQMFGDNVQKLQEHLRPYATDLQAQINAQTQDMKRQLTPYIQRMQTTIQDNVENLQSSMVPFANELKEKFNQNMEGLKGQLTPRANELKATIDQNLEDLRSRLAPLAEGVQEKLNHQMEGLAFQMKKNAEELHTKVSTNIDQLQKNLAPLVEDVQSKLKGNTEGLQKSLEDLNKQLDQQVEVFRRAVEPLGDKFNMALVQQMEKFRQQLGSDSGDVESHLSFLEKNLREKVSSFMSTLQKKGSPDQPLALPLPEQVQEQVQEQVQPKPLES

SEQ ID NO: 1327 - protein, 201 aa, Homo sapiens
MEWVWALVLLAALGGGSAERDCRVSSFRVKENFDKARFSGLWYAIAKKDPEGLFLQDNIIAEFSVDEKGHMSATAKGRVRLLSNWEVCADMVGTFTDTEDPAKFKMKYWGVASFLQRGNDDHWIIDTDYDTFALQYSCRLQNLDGTCADSYSFVFSRDPNGLTPETRRLVRQRQEELCLERQYRWIEHNGYCQSRPSRNSL

SEQ ID NO: 1328 - protein, 354 aa, Homo sapiens; identical to SEQ ID NO: 1306

SEQ ID NO: 1329 - protein, 527 aa, Homo sapiens
MADSRDPASDQMKQWKEQRAPQKPDVLTTGGGNPIGDKLNIMTAGPRGPLLVQDVVFTDEMAHFDRERIPERVVHAKGAGAFGYFEVTHDITRYSKAKVFEHIGKRTPIAVRFSTVAGESGSADTVRDPRGFAVKFYTEDGNWDLVGNNTPIFFIRDAMLFPSFIHSQKRNPQTHLKDPDMVWDFWSLCPESLHQVTFLFSDRGIPDGHRHMNGYGSHTFKLVNANGEAVYCKFHYKTDQGIKNLPVEEAGRLAQEDPDYGLRDLFNAIASGNYPSWTFYIQVMTFKEAETFPFNPFDLTKVWPHKDYPLIPVGKLVLNRNPANYFAEVEQMAFDPSNMPPGIEPSPDKMLQGRLFAYPDTHRHRLGPNYLQIPVNCPYRARVANYQRDGPMCMHDNQGGAPNYYPNSFSAPEQQGSALEHHSQCSADVKRFNSANEDNVTQVRTFYTKVLNEEERKRLCENIANHLKDAQLFIQRKAVKNFTDVHPDYGARVQALLDQYNSQKPKNAIHTYVQAGSHIAAKGKANL

SEQ ID NO: 1330 - protein, 1500 aa, Homo sapiens
MTRILTACKVVKTLKSGFGLANVTSKRQWDFSRPGIRLLSVKAQTAHIVLEDGTKMKGYSFGHPSSVAGEVVFNTGLGGYSEALTDPAYKGQILTMANPIIGNGGAPDTTARDELGLNKYMESDGIKVAGLLVLNYSHDYNHWLATKSLGQWLQEEKVPAIYGVDTRMLTKIIRDKGTMLGKIEFEGQSVDFVDPNKQNLIAEVSTKDVKVFGKGNPTKVVAVDCGIKNNVIRLLVKRGAEVHLVPWNHDFTQMDYDGLLIAGGPGNPALAQPLIQNVKKILESDRKEPLFGISTGNIITGLAAGAKSYKMSMANRGQNQPVLNITNRQAFITAQNHGYALDNTLPAGWKPLFVNVNDQTNEGIMHESKPFFAVQFHPEVSPGPTDTEYLFDSFFSLIKKGKGTTITSVLPKPALVASRVEVSKVLILGSGGLSIGQAGEFDYSGSQAVKAMKEENVKTVLMNPNIASVQTNEVGLKQADAVYFLPITPQFVTEVIKAERPDGLILGMGGQTALNCGVELFKRGVLKEYGVKVLGTSVESIMATEDRQLFSDKLNEINEKIAPSFAVESMEDALKAADTIGYPVMIRSAYALGGLGSGICPNKETLMDLGTKAFAMTNQILVERSVTGWKEIEYEVVRDADDNCVTVCNMENVDAMGVHTGDSVVVAPAQTLSNAEFQMLRRTSINVVRHLGIVGECNIQFALHPTSMEYCIIEVNARLSRSSALASKATGYPLAFIAAKIALGIPLPEIKNVVSGKTSACFEPSLDYMVTKIPRWDLDRFHGTSSRIGSSMKSVGEVMAIGRTFEESFQKALRMCHPSVDGFTPRLPMNKEWPANLDLRKELSEPSSTRIYAIAKALENNMSLDEIVKLTSIDKWFLYKMRDILNMDKTLKGLNSESVTEETLRQAKEIGFSDKQISKCLGLTEAQTRELRLKKNIHPWVKQIDTLAAEYPSVTNYLYVTYNGQEHDIKFDEHGIMVLGCGPYHIGSSVEFDWCAVSSIRTLRQLGKKTVVVNCNPETVSTDFDECDKLYFEELSLERILDIYHQEACNGCIISVGGQIPNNLAVPLYKNGVKIMGTSPLQIDRAEDRSIFSAVLDELKVAQAPWKAVNTLNEALEFANSVGYPCLLRPSYVLSGSAMNVVFSEDEMKRFLEEATRVSQEHPVVLTKFIEGAREVEMDAVGKEGRVISHAISEHVEDAGVHSGDATLMLPTQTISQGAIEKVKDATRKIAKAFAISGPFNVQFLVKGNDVLVIECNLRASRSFPFVSKTLGVDFIDVATKVMIGESVDEKHLPTLEQPIIPSDYVAIKAPMFSWPRLRDADPILRCEMASTGEVACFGEGIHTAFLKAMLSTGFKIPQKGILIGIQQSFRPRFLGVAEQLHNEGFKLFATEATSDWLNANNVPATPVAWPSQEGQNPSLSSIRKLIRDGSIDLVINLPNNNTKFVHDNYVIRRTAVDSGIALLTNFQVTKLFAEAVQKARTVDSKSLFHYRQYSAGKAA

SEQ ID NO: 1331 - protein, 477 aa, Homo sapiens
MTPTGAGLKATIFCILTWVSLTAGDRVYIHPFHLLYYSKSTCAQLENPSVETLPEPTFEPVPIQAKTSPVDEKTLRDKLVLATEKLEAEDRQRAAQVAMIANFMGFRMYKMLSEARGVASGAVLSPPALFGTLVSFYLGSLDPTASQLQVLLGVPVKEGDCTSRLDGHKVLTALQAVQGLLVTQGGSSSQTPLLQSTVVGLFTAPGLRLKQPFVESLGPFTPAIFPRSLDLSTDPVLAAQKINRFVQAVTGWKMNLPLEGVSTDSTLFFNTYVHFQGKMRGFSQLTGLHEFWVDNSTSVSVPMLSGTGNFQHWSDAQNNFSVTRVPLGESVTLLLIQPQCASDLDRVEVLVFQHDFLTWIKNPPPRAIRLTLPQLEIRGSYNLQDLLAQAKLSTLLGAEANLGKMGDTNPRVGEVLNSILLELQAGEEEQPTESAQQPGSPEVLDVTLSSPFLFAIYERDSGALHFLGRVDNPQNVV

SEQ ID NO: 1332 - protein, 364 aa, Homo sapiens; identical to SEQ ID NO: 1161

SEQ ID NO: 1333 - protein, 364 aa, Homo sapiens; identical to SEQ ID NO: 1161

SEQ ID NO: 1334 - protein, 654 aa, Homo sapiens
MKFTVVAAALLLLCAVRAEEEDKKEDVGTVVGIDLGTTYSCVGVFKNGRVEIIANDQGNRITPSYVAFTPEGERLIGDAAKNQLTSNPENTVFDAKRLIGRTWNDPSVQQDIKFLPFKVVEKKTKPYIQVDIGGGQTKTFAPEEISAMVLTKMKETAEAYLGKKVTHAVVTVPAYFNDAQRQATKDAGTIAGLNVMRIINEPTAAAIAYGLDKREGEKNILVFDLGGGTFDVSLLTIDNGVFEVVATNGDTHLGGEDFDQRVMEHFIKLYKKKTGKDVRKDNRAVQKLRREVEKAKRALSSQHQARIEIESFFEGEDFSETLTRAKFEELNMDLFRSTMKPVQKVLEDSDLKKSDIDEIVLVGGSTRIPKIQQLVKEFFNGKEPSRGINPDEAVAYGAAVQAGVLSGDQDTGDLVLLDVCPLTLGIETVGGVMTKLIPRNTVVPTKKSQIFSTASDNQPTVTIKVYEGERPLTKDNHLLGTFDLTGIPPAPRGVPQIEVTFEIDVNGILRVTAEDKGTGNKNKITITNDQNRLTPEEIERMVNDAEKFAEEDKKLKERIDTRNELESYAYSLKNQIGDKEKLGGKLSPEDKETMEKAVEEKIEWLESHQDADIEDFKAKKKELEEIVQPIISKLYGSGGPPPTGEEDTSEKDEL

SEQ ID NO: 1335 - protein, 509 aa, Homo sapiens
MSVSALSSTRFTGSISGFLQVASVLGLLLLLVKAVQFYLQRQWLLKAFQQFPSPPFHWFFGHKQFQGDKELQQIMTCVENFPSAFPRWFWGSKAYLIVYDPDYMKVILGRSDPKANGVYRLLAPWIGYGLLLLNGQPWFQHRRMLTPAFHYDILKPYVKNMADSIRLMLDKWEQLAGQDSSIEIFQHISLMTLDTVMKCAFSHNGSVQVDGNYKSYIQAIGNLNDLFHSRVRNIFHQNDTIYNFSSNGHLFNRACQLAHDHTDGVIKLRKDQLQNAGELEKVKKKRRLDFLDILLLARMENGDSLSDKDLRAEVDTFMFEGHDTTASGVSWIFYALATHPKHQQRCREEVQSVLGDGSSITWDHLDQIPYTTMCIKEALRLYPPVPGIVRELSTSVTFPDGRSLPKGIQVTLSIYGLHHNPKVWPNPEVFDPSRFAPDSPRHSHSFLPFSGGARNCIGKQFAMSEMKVIVALTLLRFELLPDPTKVPIPLPRLVLKSKNGIYLYLKKLH

SEQ ID NO: 1336 - protein, 648 aa, Homo sapiens
MEHIQGAWKTISNGFGLKDAVFDGSSCISPTIVQQFGYQRRASDDGKLTDSSKTSNTIRVFLPNKQRTVVNVRNGMSLHDCLMKALKVRGLQPECCAVFRLLQEHKGKKARLDWNTDAASLIGEELQVDFLDHVPLTTHNFARKTFLKLAFCDICQKFLLNGFRCQTCGYKFHEHCSTKVPTMCVDWSNIRQLLLFPNSTASDSGVPAPPSFTMRRMRESVSRMPASSQHRYSTPHAFTFNTSSPSSEGSLSQRQRSTSTPNVHMVSTTLPVDSRMIEDAIRSHSESASPSALSSSPNNLSPTGWSQPKTPVPAQRERAPGSGTQEKNKIRPRGQRDSSYYWEIEASEVMLSTRIGSGSFGTVYKGKWHGDVAVKILKVVDPTPEQLQAFRNEVAVLRKTRHVNILLFMGYMTKDNLAIVTQWCEGSSLYKHLHVQETKFQMFQLIDIARQTAQGMDYLHAKNIIHRDMKSNNIFLHEGLTVKIGDFGLATVKSRWSGSQQVEQPTGSVLWMAPEVIRMQDNNPFSFQSDVYSYGIVLYELMTGELPYSHINNRDQIIFMVGRGYASPDLSRLYKNCPKAMKRLVADCVKKVKEERPLFPQILSSIELLQHSLPKINRSASEPSLHRAAHTEDINACTLTTSPRLPVF

SEQ ID NO: 1337 - protein, 127 aa, Homo sapiens; identical to SEQ ID NO: 1237

SEQ ID NO: 1338 - protein, 127 aa, Homo sapiens; identical to SEQ ID NO: 1237

SEQ ID NO: 1339 - protein, 229 aa, Homo sapiens
MAEDFGFFSSSESGAPEAAEEDPAAAFLAQQESEIAGIENDSGFGAPAASQVASAQPGLASGGGSEDMGTTVNGDVFQEANGPADGYAAIAQADRLTQEPESIRKWREEQKKRLQELDAASKVTEQEWREKAKKDLEEWNQRQSEQVEKNKINNRIADKAFYQQPDADTIGYVASEEAFVKESKEETPGTEWEKVAQLCDFNPKSSKQCKDVSRLRSVLMSLKQTPLSR

SEQ ID NO: 1340 - protein, 149 aa, Homo sapiens [sequence omitted]

SEQ ID NO: 1341 - protein, 297 aa, Homo sapiens
MGFVKVVKNKAYFKRYQVRFRRRREGKTDYYARKRLVIQDKNKYNTPKYRMIVRVTNRDIICQIAYARIEGDMIVCAAYAHELPKYGVKVGLTNYAAAYCTGLLLARRLLNRFGMDKIYEGQVEVNGDEYNVESIDGQPGAFTCYLDAGLARTTTGNKVFGALKGAVDGGLSIPHSTKRFPGYDSESKEFNAEVHRKHIMGQNVADYMRYLMEEDEDAYKKQFSQYIKNNVTPDMMEEMYKKAHAAIRENPVYEKKPKREVKKKRWNRPKMSLAQKKDRVAQKKASFLRAQERAAES

SEQ ID NO: 1342 - protein, 333 aa, Homo sapiens
MVKVGVNGFGRIGRLVTRAAFSCDKVDIVAINDPFIDLNYMVYMFQYDSTHGKFNGTVKAENGKLVINGKPITIFQERDPANIKWGDAGAEYVVESTGVFTTMEKAGAHLKGGAKRVIISAPSADAPMFVMGVNHEKYDNSLKIVSNASCTTNCLAPLAKVIHDNFGIVEGLMTTVHAITATQKTVDGPSGKLWRDGRGAAQNIIPASTGAAKAVGKVIPELNGKLTGMAFRVPTPNVSVVDLTCRLEKPAKYDDIKKVVKQAAEGPLKGILGYTEDQVVSCDFNSNSHSSTFDAGAGIALNDNFVKLISWYDNEYGYSNRVVDLMAYMASKE

SEQ ID NO: 1343 - protein, 491 aa, Homo sapiens; identical to SEQ ID NO: 1211

SEQ ID NO: 1344 - protein, 1487 aa, Homo sapiens
MKKNREAQLCLFSALLAFLPFASLLNGNSKYMVLVPSQLYTETPEKICLHLYHLNETVTVTASLISQRGTRKLFDELVVDKDLFHCLSFTIPRLPSSEEEESLDINIEGAKHKFSERRVVLVKNKESVVFVQTDKPVYKPGQSVKFRVVSMDKNLHPLNELFPLAYIEDPKMNRIMQWQDIKTENGLKQLSFSLSAEPIQGPYKIVILKQSGVKEEHSFTVMEFVLPRFGVDVKVPNAISVYDEIINVTACAIYTYGKPVPGHVKISLCHGNPSFSSETKSACKEEDSELDNNGCSTQEVNITEFQLKENYLKMHQAFHVNATVTEEGTGSEFSGSGRIEVERTRNKFLFLKADSHFRHGIPFFVKIRLVDIKGDPIPNEQVFIKAQEAGYTNATTTDQHGLAKFSIDTSSISGYSLNIKVYHKEESSCIHSSCTAERHAEEHHTAYAVYSLSKSYIYLDTEAGVLPCNQIHTVQAHFILKGQVLGVLPQIVFHYLVMAQGSILQTGNHTHQVEPGVSQVQGNFALEIPVEFSMVPVAKMLIYTILPDGEVIADSVTFQVEKCLRNKVHLSFSPSQSLPASQTHMRVTASPQSLCGLRAVDQSVLLLKPEAELSPSLIYDLPGMQDSNFIPSSYHPFEDEYDCLMYQPRDTEELTYSVPYGREKDVYRYVRDMGLTAFTNLKIKHPTYCYEMNMVVLSAPAVESELSPRGGEFEMMPLGVNKSPLPKEPPRKDPPPKDPVIETIRNYFPETWIWDLVTVNSSGVTEVEMTVPDTITEWKAGALCLSNDTGLGLSSVATLQAFQPFFVELTMPYSVIRGEAFMLKATVMNYLPTSLPMAVQLEASPDFTAVPVGNDQDSYCLGANGRHTSSWLVTPKSLGNVNFSVSVEAQQSPELCGSQVATVPETGRKDTVVKVLIVEPEGIKKEHTFSSLLCASDAELSETLSLLLPPTVVKDSARAHFSVMGDILSSAIKNTQNLIQMPYGCGEQNMVLFAPNIYVLKYLNETQQLTEKIKSKALGYLRAGYQRELNYKHKDGSYSAFGDHNGQGQGNTWLTAFVLKSFAQARAFIFIDESHITDAFTWLSKQQKDSGCFRSSGSLFNNAMKGGVDDEITLSAYITMALLESSLPDTDPVVSKALGCLEASWETIEQGRNGSFVYTKTLMAYAFALAGNQEKRNEILKSLDKEAIREDNSIHWERPQKPTKSEGYLYTPQASSAEVEMSAYVVLARLTAQPAPSPEDLALSMGTIKWLTKQQNSHGGFSSTQDTVVALDALSKYGAATFSKSQKTPLVTIQSSGSFSQKFQVDNSNRLLLQQVSLPDIPGNYTVSVSGEGCVYAQTTLRYNMPLEKQQPAFALKVQTVPLTCNNPKGQNSFQISLEISYTGSRPASNMVIADVKMLSGFIPLKPTVKKLERLEHVSRTEVTTNNVLLYLDQVTNQTLSFSFIIQQDIPVKNLQPAIVKVYDYYETDEVAFAEYSSPCSSDKQNV

SEQ ID NO: 1345 - protein, 1487 aa, Homo sapiens; identical to SEQ ID NO: 1344

SEQ ID NO: 1346 - protein, 1487 aa, Homo sapiens; identical to SEQ ID NO: 1344

SEQ ID NO: 1347 - protein, 309 aa, Homo sapiens
MDDKAFTKELDQWVEQLNECKQLNENQVRTLCEKAKEILTKESNVQEVRCPVTVCGDVHGQFHDLMELFRIGGKSPDTNYLFMGDYVDRGYYSVETVTLLVALKVRYPERITILRGNHESRQITQVYGFYDECLRKYGNANVWKYFTDLFDYLPLTALVDGQIFCLHGGLSPSIDTLDHIRALDRLQEVPHEGPMCDLLWSDPDDRGGWGISPRGAGYTFGQDISETFNHANGLTLVSRAHQLVMEGYNWCHDRNVVTIFSAPNYCYRCGNQAAIMELDDTLKYSFLQFDPAPRRGEPHVTRRTPDYFL

SEQ ID NO: 1348 - protein, 520 aa, Homo sapiens
MSNKCDVIVVGGGISGMAAAKLLHDCGLSVVVLEARDCVGGRTYTIRNKNVKYVDLGGSYVGPTQNRILRLAKELGLETYKVNEVERLIHFVKGKSYAFRGPFPPVWNPITYLDYNNLWRTMDEMGQEIPSDAPWKAPLAEEWDYMTMKELLDKICWTNSTKQIATLFVNLCVTAETHEVSALWFLWYVKQCGGTTRIISTTNGGQERKFIGGSGQVSERIKDILGDRVKLERPVIHIDQTGENVVVKTLNHEIYEAKYVISAIPPVLGMKIHHSPPLPILRNQLITRVPLGSVIKCMVYYKEPFWRKKDFCGTMVIEGEEAPIAYTLDDTKPDAGCAAIMGFILAHKARKLVRLTKEERLRKLCELYAKVLNSQEALQPVHYEEKNWCEEQYSGGCYTAYFPPGILTQYGRVLRQPVGKIFFAGTETASHWSGYMEGAVEAGERAAREILHAIGKIPEDEIWQPEPESVDVPARPITNTFLERHLPSVPGLLKLLGLTTILSATALGFLAHKKGLFVRF

SEQ ID NO: 1349 - protein, 249 aa, Homo sapiens
MKLNISFPATGCQKLIEVDDERKLRTFYEKRMATEVAADALGEEWKGYVVRISGGNDKQGFPMKQGVLTHGRVRLLLSKGHSCYRPRRTGERKRKSVRGCIVDANLSVLNLVIVKKGEKDIPGLTDTTVPRRLGPKRASRIRKLFNLSKEDDVRQYVVRKPLNKEGKKPRTKAPKIQRLVTPRVLQHKRRRIALKKQRTKKNKEEAAEYAKLLAKRMKEAKEKRQEQIAKRRRLSSLRASTSKSESSQK

SEQ ID NO: 1350 - protein, 249 aa, Homo sapiens; identical to SEQ ID NO: 1349

SEQ ID NO: 1351 - protein, 638 aa, Homo sapiens
MILFKQVGYFVSLFATVSCGCLSQLYANTFFRGGDLAAIYTPDAQHCQKMCTFHPRCLLFSFLAVSPTKETDKRFGCFMKESITGTLPRIHRTGAISGHSLKQCGHQLSACHQDIYEGLDMRGSNFNISKTDSIEECQKLCTNNIHCQFFTYATKAFHRPEYRKSCLLKRSSSGTPTSIKPVDNLVSGFSLKSCALSEIGCPMDIFQHFAFADLNVSQVVTPDAFVCRTVCTFHPNCLFFTFYTNEWETESQRNVCFLKTSKSGRPSPPIIQENAVSGYSLFTCRKARPEPCHFKIYSGVAFEGEELNATFVQGADACQETCTKTIRCQFFTYSLLPQDCKAEGCKCSLRLSTDGSPTRITYEAQGSSGYSLRLCKVVESSDCTTKINARIVGGTNSSLGEWPWQVSLQVKLVSQNHMCGGSIIGRQWILTAAHCFDGIPYPDVWRIYGGILNLSEITNKTPFSSIKELIIHQKYKMSEGSYDIALIKLQTPLNYTEFQKPICLPSKADTNTIYTNCWVTGWGYTKERGETQNILQKATIPLVPNEECQKKYRDYVITKQMICAGYKEGGIDACKGDSGGPLVCKHSGRWQLVGITSWGEGCARKEQPGVYTKVAEYIDWILEKIQSSKERALETSPA

SEQ ID NO: 1352 - protein, 765 aa, Homo sapiens
MAATGTAAAAATGKLLVLLLLGLTAPAAALAGYIEALAANAGTGFAVAEPQIAMFCGKLNMHVNIQTGKWEPDPTGTKSCLGTKEEVLQYCQEIYPELQITNVMEANQPVNIDSWCRRDKKQCRSHIVIPFKCLVGEFVSDVLLVPENCQFFHQERMEVCEKHQRWHTVVKEACLTEGMTLYSYGMLLPCGVDQFHGTEYVCCPQTKVVDSDSTMSKEEEEEEEEDEEEDYALDKSEFPTEADLEDFTEAAADEDEDEEEEEEEEGEEVVEDRDYYYDSFKGDDYNEENPTEPSSDGTISDKEIAHDVKAVCSQEAMTGPCRAVMPRWYFDLSKGKCVRFIYGGCGGNRNNFESEDYCMAVCKTMIPPTPLPTNDVDVYFETSADDNEHARFQKAKEQLEIRHRSRMDRVKKEWEEAELQAKNLPKAERQTLIQHFQAMVKALEKEAASEKQQLVETHLARVEAMLNDRRRIALENYLAALQSDPPRPHRILQALRRYVRAENKDRLHTIRHYQHVLAVDPEKAAQMKSQVMTHLHVIEERRNQSLSLLYKVPYVAQEIQEEIDELLQEQRADMDQFTSSISENPVDVRVSSEESEEIPPFHPFHPFPSLSENEDTQPELYHPMKKGSGMAEQDGGLIGAEEKVINSKNKMDENMVIDETLDVKEMIFNAERVGGLEEEPDSVGPLREDFSLSSSALIGLLVIAVAIATVIVISLVMLRKRQYGTISHGIVEVHPMLTPEERHLNKMQNHGYENPTYKYLEQMQI

SEQ ID NO: 1353 - protein, 765 aa, Homo sapiens; identical to SEQ ID NO: 1352

SEQ ID NO: 1354 - protein, 285 aa, Homo sapiens; identical to SEQ ID NO: 1110

SEQ ID NO: 1355 - protein, 292 aa, Homo sapiens; identical to SEQ ID NO: 1193

SEQ ID NO: 1356 - protein, 782 aa, Homo sapiens; identical to SEQ ID NO: 1125

SEQ ID NO: 1357 - protein, 782 aa, Homo sapiens; identical to SEQ ID NO: 1125

SEQ ID NO: 1358 - protein, 1209 aa, Homo sapiens
MRPSGTARTKLLLLLAALCAAGGALEEKKVCQGTSNRLTQLGTFEDHFLSLQRMFNNCEVVLGNLEITYVQRNYDLSFLKTIQEVAGYVLIALNTVERIPLENLQIIRGNALYENTYALAVLSNYGTNKTGLRELPMRNLQEILIGAVRFSNNPILCNMETIQWRDIVQDVFLSNMSMDVQRHLTGCPKCDPSCPNGSCWGRGEENCQKLTKIICAQQCSRRCRGRSPSDCCHNQCAAGCTGPRESDCLVCHRFRDEATCKDTCPPLMLYNPTTYQMDVNPEGKYSFGATCVKKCPRNYVVTDHGSCVRACGPDYYEVEEDGVSKCKKCDGPCRKVCNGIGIGEFKDTLSINATNIKHFKYCTAISGDLHILPVAFKGDSFTRTPPLDPRELEILKTVKEITGFLLIQAWPENWTDLHAFENLEIIRGRTKQHGQFSLAVVGLNITSLGLRSLKEISDGDVIISGNRNLCYANTINWKKLFGTPNQKTKIMNNRAEKDCKATNHVCNPLCSSEGCWGPEPTDCVSCQNVSRGRECVDKCNILEGEPREFVENSECIQCHPECLPQTMNITCTGRGPDNCIKCAHYVDGPHCVKTCPSGIMGENNTLVWKFADANNVCHLCHANCTYGCAGPGLKGCQQPEGPKIPSIATGIVGGLLFIVVVALGIGLFMRRRQLVRKRTLRRLLQERELVEPLTPSGEAPNQAHLRILKETEFKKIKVLGSGAFGTVYKGLWIPEGEKVKIPVAIKELREATSPKANKEILDEAYVMASVDNPHVCRLLGICLTSTVQLITQLMPYGCLLDYVREHKDNIGSQYLLNWCVQIAKGMNYLEDRRLVHRDLAARNVLVKTPQHVKITDFGLAKLLGAEEKEYHAEGGKVPIKWMALESILHRIYTHQSDVWSYGVTVWELMTFGSKPYDGIPASEISSILEKGERLPQPPICTIDVYMIMVKCWMIDADSRPKFRELILEFSKMARDPQRYLVIQGDERMHLPSPTDSNFYRALMEEEDMEDVVDADEYLIPQQGFFNSPSTSRTPLLSSLSANSNSSTVACINRNGSCRVKEDAFLQRYSSDPTSVLTEDNIDDTFLPVPEYINQSVPKRPAGSVQNPVYHNQPLHPAPGRDLHYQNPHSNAVSNPEYLNTAQPTCLSSGFDSSALWIQKGSHQMSLDNPDYQQDFFPKEAKPNGIFKGPTAENAEYLRVAPPSSEFSGA

SEQ ID NO: 1359 - protein, 533 aa, Homo sapiens
MAVLSRMRLRWALLDTRVMGHGLCPQGARAKAAIPAALRDHESTEGPGTGQDRPRLRSLAELPGPGTLRFLFQLFLRGYVLHLHELQALNKAKYGPMWTTTFGTRTNVNLASAPLLEQVMRQEGKYPIRDSMEQWKEHRDHKGLSYGIFITQGQQWYHLRHSLNQRIVKPAEAALYTDALNEVISDFIARLDQVRTESASGDQVPDVANLLYHLALEAICYILFEKRVGCLEPSIPEDTATFIRSVGLMFKNSVYVTFLPKWSRPLLPFWKRYMNNWDNIFSFGEKMIHQKVQEIEAQLQAAGPDGVQVSGYLHFLLTKELLSPQETVGTFPELILAGVDTTSNTLTWALYHLSKNPEIQEALHKEVTGVVPFGKVPQNKDFAHMPLLKAVIKETLRLYPVVPTNSRIITEKETEINGFLFPKNTQFVLCHYVVSRDPSVFPEPESFQPHRWLRKREDDNSGIQHPFGSVPFGYGVRSCLGRRIAELEMQLLLSRLIQKYEVVLSPGMGEVKSVSRIVLVPSKKVSLRFLQRQ

SEQ ID NO: 1360 - protein, 332 aa, Homo sapiens
MAALKDQLIVNLLKEEQVPQNKITVVGVGAVGMACAISILMKDLADELALVDVIEDKLKGEMMDLQHGSLFLKTPKIVSSKDYSVTANSKLVIITAGARQQEGESRLNLVQRNVNIFKFIIPNVVKYSPQCKLLIVSNPVDILTYVAWKISGFPKNRVIGSGCNLDSARFRYLMGERLGVHPLSCHGWVLGEHGDSSVPVWSGVNVAGVSLKSLNPQLGTDADKEQWKDVHKQVVDSAYEVIKLKGYTSWAIGLSVADLAESIMKNLRRVHPISTMIKGLYGIKEDVFLSVPCILGQNGISDVVKVTLTPDEEARLKKSADTLWGIQKELQF

SEQ ID NO: 1361 - protein, 241 aa, Homo sapiens; identical to SEQ ID NO: 1281

SEQ ID NO: 1362 - protein, 44 aa, Homo sapiens
MADKPDMGEIASFDKAKLKKTETQEKNTLPTKETIEQEKRSEIS

SEQ ID NO: 1363 - protein, 272 aa, Homo sapiens
MPEFLTVVSWPFLILLSFQVRVVAGAPQPWHCAPCTAERLELCPPVPASCPEISRPAGCGCCPTCALPLGAACGVATARCAQGLSCRALPGEPRPLHALTRGQGACVLEPAAPATSSLSGSQHEEAKAAVASEDELAESPEMTEEQLLDSFHLMAPSREDQPILWNAISTYSSMRAREITDLKKWKEPCQRELYKVLERLAAAQQKAGDEIYKFYLPNCNKNGFYHSKQCETSLDGEAGLCWCVYPWSGKKIPGSLETRGDPNCHQYFNVQN

SEQ ID NO: 1364 - protein, 902 aa, Homo sapiens
MKIAVIGQSLFGQEVYCQLRKEGHEVVGVFTIPDKDGKADPLGLEAEKDGRAVFKFPRWRARGQALPEVVAKYQALGAELNVLPFCSQFIPMEVINAPRHGSIIYHPSLLPRHRGASAINWTLIHGDKKGGFTIFWADDGLDTGDLLLQKECEVLPDDTVSTLYNRFLFPEGIKGMVQAVRLIAEGTAPRCPQSEEGATYEGIQKKETAKINWDQPAEAIHNWIRGNDKVPGAWTEACGQKLTFFNSTLNTSGLSTQGEALPIPGAHRPGVVTKAGLILFGNEHRMLLVKNIQLEDGKMMPASQFFKGSASSDLELTEAELATAEAVRSSWMRILPNVPEVEDSTDFFKSGAASVDVVRLVEEVKELCDGLELENEDVYMATTFREFIQLLVRKLRGEDDESECVINYVERAVNKLTLQMPYQLFIGGEFVDAEGSKTYNTINPTDGSVICQVSLAQVSDVDKAVAAAKEAFENGLWGKINARDRGRLLYRLADVMEQHQEELATIEALDRGAVYTLALKTHVGMSIQTFRYFAGWCDKIQGATIPINQARPNRNLTLTKKEPVGVCGIVIPWNYPLMMLSWKTAACLAAGNTVVIKPAQVTPLTALKFAELTLKAGIPKGVVNILPGSGSLVGQRLSDHPDVRKIGFTGSTEVGKHIMKSCALSNVKKVSLELGGKSPLIIFADCDLNKAVQMGMSSVFFNKGENCIAAGRLFVEESIHNQFVQKVVEEVEKMKIGNPLERDTNHGPQNHEAHLRKLVEYCQRGVKEGATLVCGGNQVPRPGFFFQPTVFTDVEDHMYIAKEESFGPIMIISRFADGDVDAVLSRANATEFGLASGVFTRDINKALYVSDKLQAGTVFINTYNKTDVAAPFGGFKQSGFGKDLGEAALNEYLRIKTVTFEY

SEQ ID NO: 1365 - protein, 1898 aa, Homo sapiens
MAPEPAPGRRMVPLVPALVMLGLMAGAHGDSKPVFVKVPEDQIGLSGGVASFVCQATGEPKPRITWMKKGKKVSSQRFEVIEFDDGAGSVLRIQPLRVQRDEAIYECTATNSLGEINTSAKLSVLEEDQLPSGFPTIDMGPQLKVVEKARTATMLCAAGGNPDPEISWFKDFLPVDPASSNGRIKQLRSGALQIESSEESDQGKYECVATNSAGTRYSAPANLYVRVRRVAPRFSIPPSSQEVMPGGNVNLTCVAVGAPMPYVKWMMGAEELTKEDEMPVGRNVLELSNVMRSANYTCVAISSLGMIEATAQVTVKALPKPPIDLVVTETTATSVTLTWDSGNTEPVSFYGIQYRAAGTDGPFQEVDGVASTRYSIGGLSPFSEYAFRVLAVNSIGRGPPSEAVRARTGEQAPSSPPRRVQARMLSASTMLVQWEPPEEPNGLVRGYRVYYTPDSRRPLSAWHKHNTDAGLLTTVGSLLPGITYSLRVLAFTAVGDGPPSPTIQVKTQQGVPAQPADFQAKAESDTRIQLSWLLPPQERIIKYELVYWAAEDEGQQHKVTFDPTSSYTLEDLKPDTLYHFQLAARSDLGVGVFTPTVEACTAQSTPSAPPQKVTCVSTGSTTVRVSWVPPPADSRNGIITQYSVAYEAVDGEDRKRHVVDGISREHSSWDLLGLEKWTEYRVWVRAHTDVGPGPESSPVLVRTDEDVPSGPPRKVEVEPLNSTAVHVSWKLPVPNKQHGQIRGYQVTYVRLENGEPRGQPIIQDVMLAEAQETTISGLTPETTYSITVAAYTTKGDGARSKPKVVTTTGAVPGRPTMMVSTTAMHTALLQWHPPKELPGELLGYRLQYRRADEARPNTIDFGKDDQHFTVTGLHKGATYIFRLAAKNRAGPGEEFEKEITTPEDAPSGFPQNLRVTGLTTSTTELAWDPPVLAERNGRITNYTVVYRDINSQHELQNVTGDVHLTLLGLKPDTTYDIKVRAHTSKGAGPLSPSIQSRTMPMEQVFAKNFRVAAAMKTSVLLSWEVPDSYKSAVPFKILYNGQSVEVDGHSMRKLIADLQPNTEYSFVLMNRGTSAGGLQHLVSIRTAPDLLPQKPLPASAFIEDGRFSLSMPQVQDPSLVRWFYIVVVPIDRVGGNLLAPRWSTPEELELDELLEAIEQGEEKQRRRRRQAERLKPYVAAQVDELPETFTLGDKKNYRGFYNRPLSPDLSYQCFVLASLKEPMDQKRYASSPYSDEIVVQVTPAQQQEEPEMLWVTGPVLAVILIILIVIAILLFKRKRTHSPSSKDEQSIGLKDSLLAHSSDPVEMRRLNYQTPGMRDHPPIPITDLADNIERLKANDGLKFSQEYESIDPGQQFTWENSNSEVNKPKNRYANVIAYDHSRVLLTSIDGVPGSDYINANYIDGYRKQNAYIATQGPLPETMGDFWRMVWEQRIATVVMMTRLEEKSRVKCDQYWPARGTETYGLIQVTLVDTVELATYTMRTFALHKSGSSEKRELRQFQFMAWPDHGVPEYPTPILAFLRRVKACNPLDAGPMVVHCSAGVGRTGCFIVIDAMLERMKHEKTVDIYGHVTCMRSQRNYMVQTEDQYVFIHEALLEAAMCGHTEVLARNLYAHIQKLGQVPPGESVTAMELEFKLLAGSKARASRFISANLPCNKFKNRLVNIMPYELTRVCLQPIRGVEGSDYINASFLDGYRQQKAYIATQGPLAESTEDFWRMLWEHNSTIIVMLTKLREMGREKCHQYWPAERSARYQYFVVDPMAEYNMPQYILREFKVTDARDGQSRTIRQFQFTDWPEQGVPKTGEGFIDFIGQVHKTKEQFGQDGPITVHCSAGVGRTGVFITLSIVLERMRYEGVVDMFQTVKTLRTQRPAMVQTEDQYQLCYRAALEYLGSFDHYAT

SEQ ID NO: 1366 - protein, 515 aa, Homo sapiens
MNPDLDTGHNTSAPAHWGELKDDNFTGPNQTSSNSTLPQLDVTRAISVGLVLGAFILFAIVGNILVILSVACNRHLRTPTNYFIVNLAIADLLLSFTVLPFSATLEVLGYWVLGRIFCDIWAAVDVLCCTASILSLCAISIDRYIGVRYSLQYPTLVTRRKAILALLSVWVLSTVISIGPLLGWKEPAPNDDKECGVTEEPFYALFSSLGSFYIPLAVILVMYCRVYIVAKRTTKNLEAGVMKEMSNSKELTLRIHSKNFHEDTLSSTKAKGHNPRSSIAVKLFKFSREKKAAKTLGIVVGMFILCWLPFFIALPLGSLFSTLKPPDAVFKVVFWLGYFNSCLNPIIYPCSSKEFKRAFMRILGCQCRGGRRRRRRRRLGGCAYTYRPWTRGGSLERSQSRKDSLDDSGSCMSGSQRTLPSASPSPGYLGRGTQPPVELCAFPEWKPGALLSLPEPPGRRGRLDSGPLFTFKLLGDPESPGTEGDTSNGGCDTTTDLANGQPGFKSNMPLAPGHF

SEQ ID NO: 1367 - protein, 418 aa, Homo sapiens
MSMFFYLFLLVLGLQATIHCAPHNSSEGKVTTCHLPQQNATLYKMPSINADFAFRLYRKLSVENPDLNIFFSPVSISAALAMLSFGSGSSTQTQILEVLGFNLTDTPVKELQQGFQHLICSLNFPNNELELQMGNAVFIGQQLKPLAKFLDDVKTLYETEVFSTDFSNVSAAQHEINSYVEKQTKGKIVGLIQDLKLNIIMILVNYIHFKAQWANPFRVSKTEESSNFSVDKSTTVQVPMMHQLEQYYHYVDVELNCTVLQMDYSANALALFVLPKEGHMEWVEAAMSSKTLKKWNHLLQKGWVELFVPKFSISATYDLGSTLQKMGMRDAFAESADFPGITKDNGLKLSYAFHKAVLHIGEEGTKEGASPEAGSLDQPEVAPLHAVIRLDRTFLLMILEKRTRSVLFLGKVVDPTKE

SEQ ID NO: 1368 - protein, 215 aa, Homo sapiens
MGKGDPKKPRGKMSSYAFFVQTCREEHKKKHPDASVNFSEFSKKCSERWKTMSAKEKGKFEDMAKADKARYEREMKTYIPPKGETKKKFKDPNAPKRPPSAFFLFCSEYRPKIKGEHPGLSIGDVAKKLGEMWNNTAADDKQPYEKKAAKLKEKYEKDIAAYRAKGKPDAAKKGVVKAEKSKKKKEEEDDEEDEEDEEEEEEEEDEDEEEDDDDE

SEQ ID NO: 1369 - protein, 268 aa, Homo sapiens
MSAALFSLDSPARGAPWPTEPAAFYEPGRVGKPGRGPEPGDLGEPGSTTPAMYDDESAIDFSAYIDSMAAVPTLELCHDEIFADLFNSNHKAAGAGSLELLQGGPTRPPGVGSIARGPLKREPDWGDGDAPGSLLPAQVAVCAQTVVSLAAAAQPTPPTSPEPPRGSPGPSLAPGPVREKGAGKRGPDRGSPEYRQRRERNNIAVRKSRDKAKRRNQEMQQKLVELSAENEKLHQRVEQLTRDLASLRQFFKELPSPPFLPPTGTDCR

SEQ ID NO: 1370 - protein, 484 aa, Homo sapiens; identical to SEQ ID NO: 1171

SEQ ID NO: 1371 - protein, 141 aa, Homo sapiens
MAYLLHAQLFLLTTFILVLNMRLCPVLGHFLGGIEKSSMEEEGASEALNYAVNEYNEKNSDLYLSRVVEVKDVQKQVVAGTKFFFDVILGKTICLKTQGDLTNCPLNEEADQQEHEFCSFVVHDIPWENYIVLLSSSCHSI

SEQ ID NO: 1372 - protein, 2505 aa, Homo sapiens
MEEVVIAGMSGKLPESENLQEFWANLIGGVDMVTDDDRRWKAGLYGLPKRSGKLKDLSKFDASFFGVHPKQAHTMDPQLRLLLEVSYEAIVDGGINPASLRGTNTGVWVGVSGSEASEALSRDPETLLGYSMVGCQRAMMANRLSFFFDFKGPSIALDTACSSSLLALQNAYQAIRSGECPAAIVGGINLLLKPNTSVQFMKLGMLSPDGTCRSFDDSGNGYCRAEAVVAVLLTKKSLARRVYATILNAGTNTDGCKEQGVTFPSGEAQEQLIRSLYQPGGVAPESLEYIEAHGTGTKVGDPQELNGITRSLCAFRQSPLLIGSTKSNMGHPEPASGLAALTKVLLSLENGVWAPNLHFHNPNPEIPALLDGRLQVVDRPLPVRGGIVGINSFGFGGANVHVILQPNTQQAPAPAPHAALPHLLHASGRTMEAVQGLLEQGRQHSQDLAFVSMLNDIAATPTAAMPFRGYTVLGVEGHVQEVQQVPASQRPLWFICSGMGTQWRGMGLSLMRLDSFRESILRSDEALKPLGVKVSDLLLSTDEHTFDDIVHSFVSLTAIQIALIDLLTSMGLKPDGIIGHSLGEVACGYADGCLSQREAVLAAYWRGQCIKDANLPAGSMAAVGLSWEECKQRCPPGVVPACHNSEDTVTISGPQAAVNEFVEQLKQEGVFAKEVRTGGLAFHSYFMEGIAPTLLQALKKVIREPRPRSARWLSTSIPEAQWQSSLARTSSAEYNVNNLVSPVLFQEALWHVPEHAVVLEIAPHALLQAVLKRGVKPSCTIIPLMKRDHKDNLEFFLTNLGKVHLTGIDINPNALFPPVEFPVPRGTPLISPHIKWDHSQTWDIPVAEDFPNGSSSSSATVYNIDASSESSDHYLVDHCIDGRVLFPGTGYLYLVWKTLARSLSLSLEETPVVFENVTFHQATILPRTGTVPLEVRLLEASHAFEVSDSGNLIVSGKVYQWEDPDSKLFDHPEVPIPAESESVSRLTQGEVYKELRLRGYDYGPHFQGVYEATLEGEQGKLLWKDNWVTFMDTMLQISILGFSKQSLQLPTRVTAIYIDPATHLQKVYMLEGDTQVADVTTSRCLGVTVSGGVYISRLQTTATSRRQQEQLVPTLEKFVFTPHVEPECLSESAILQKELQLCKGLAKALQTKATQQGLKMTVPGLEDLPQHGLPRLLAAACQLQLNGNLQLELGEVLARERLLLPEDPLISGLLNSQALKACIDTALENLSTLKMKVVEVLAGEGHLYSHISALLNTQPMLQLEYTATDRHPQALKDVQTKLQQHDVAQGQWDPSGPAPTNLGALDLVVCNCALATLGDPALALDNMVAALKDGGFLLMHTVLKGHALGETLACLPSEVQPGPSFLSQEEWESLFSRKALHLVGLKKSFYGTALFLCRRLSPQDKPIFLPVEDTSFQWVDSLKSILATSSSQPVWLTAMNCPTSGVVGLVNCLRKEPGGHRIRCILLSNLSSTSHVPKLDPGSSELQKVLESDLVMNVYRDGAWGAFRHFQLEQDKPEEQTAHAFVNVLTRGDLASIRWVSSPLKHMQPPSSSGAQLCTVYYASLNFRDIMLATGKLSPDAIPGKWASRDCMLGMEFSGRDKCGRRVMGLVPAEGLATSVLLSPDFLWDVPSSWTLEEAASVPVVYTTAYYSLVVRGRIQHGETVLIHSGSGGVGQAAISIALSLGCRVFTTVGSAEKRAYLQARFPQLDDTSFANSRDTSFEQHVLLHTGGKGVDLVLNSLAEEKLQASVRCLAQHGRFLEIGKFDLSNNHPLGMAIFLKNVTFHGILLDALFEGANDSWREVAELLKAGIRDGVVKPLKCTVFPKAQVEDAFRYMAQGKHIGKVLVQVREEEPEAMLPGAQPTLISAISKTFCPEHKSYIITGGLGGFGLELARWLVLRGAQRLVLTSRSGIRTGYQAKHVREWRRQGIHVLVSTSNVSSLEGARALIAEATKLGPVGGVFNLAMVLRDAMLENQTPELFQDVNKPKYNGTLNLDRATREACPELDYFVAFSSVSCGRGNAGQSNYGFANSTMERICEQRRHDGLPGLAVQWGAIGDVGIILEAMGTNDTVVGGTLPQRISSCMEVLDLFLNQPHAVLSSFVLVEKKAVAHGDGEAQRDLVKAVAHILGIRDLAGINLDSSLADLGLDSLMGVEVRQILEREHDLVLPIREVRQLTLRKLQEMSSKAGSDTELAAPKSKNDTSLKQAQLNLSILLVNPEGPTLTRLNSVQSSERPLFLVHPIEGSITVFHSLAAKLSVPTYGLQCTQAAPLDSIPNLAAYYIDCIKQVQPEGPHRVAGYSFGACVAFEMCSQLQAQQGPAPAHNNLFLFDGSHTYVLAYTQSYRAKLTPGCEAEAEAEAICFFIKQFVDAEHSKVLEALLPLKSLEDRVAAAVDLITRSHQSLDRRDLSFAAVSFYYKLRAADQYKPKAKYHGNVILLRAKTGGTYGEDLGADYNLSQVCDGKVSVHIIEGDHRTLLEGRGLESIINIIHSSLAEPRVSVREG

SEQ ID NO: 1373 - protein, 211 aa, Homo sapiens
MRVRATSPGNMQRAWILLTLGLMACVSAETRAELTSDKDMYLDSSSIEEASGLYPIDDDDYSSASGSGAYEDKGSPDLTTSQLIPRISLTSAAPEVETMTLKTQSITPTQTESPEETDKKEFEISEAEEKQDPAVKSTDVYTEKHSDNLFKRTEVLAAVIAGGVIGFLFAIFLILLLVYRMRKKDEGSYDLGERKPSSAAYQKAPTKEFYA

SEQ ID NO: 1374 - protein, 214 aa, Homo sapiens
MRYLLFWYGLPHSYSQCVCHWTPASGIFENEPLLSLLLLVLGKLVTTEKRFLKDSLYTEGILIVWDPSVYHADIPKWYQKPDYNFFETYKSYRRLNPSQPFYILKPQMPWELWDIIQEISADLIQPNPPSSGMLGIIIMMTLCDQVDIYEFLPSKRKTDVCYYHQKFFDSACTMGAYHPLLFEKNMVKHLNEGTDEDIYLFGKATLSGFRNIRC

SEQ ID NO: 1375 - protein, 214 aa, Homo sapiens; identical to SEQ ID NO: 1374

SEQ ID NO: 1376 - protein, 480 aa, Homo sapiens
MDSREFRRRGKEMVDYIADYLDGIEGRPVYPDVEPGYLRALIPTTAPQEPETYEDIIRDIEKIIMPGVTHWHSPYFFAYFPTASSYPAMLADMLCGAIGCIGFSWAASPACTELETVMMDWLGKMLELPEAFLAGRAGEGGGVIQGSASEATLVALLAARTKMIRQLQAASPELTQAALMEKLVAYTSDQAHSSVERAGLIGGVKIKAIPSDGNYSMRAAALREALERDKAAGLIPFFVVVTLGTTSCCSFDNLLEVGPICNQEGVWLHIDAAYAGSAFICPEFRYLLNGVEFADSFNFNPHKWLLVNFDCSAMWVKKRTDLTEAFNMDPVYLRHSHQDSGLITDYRHWQIPLGRRFRSLKMWFVFRMYGVKGLQAYIRKHVKLSHEFESLVRQDPRFEICTEVILGLVCFRLKGSNQLNETLLQRINSAKKIHLVPCRLRDKFVLRFAVCSRTVESAHVQLAWEHIRDLASSVLRAEKE

SEQ ID NO: 1377 - protein, 298 aa, Homo sapiens
MEEKQILCVGLVVLDIINVVDKYPEEDTDRRCLSQRWQRGGNASNSCTVLSLLGARCAFMGSLAHGHVADFLVADFRRRGVDVSQVAWQSQGDTPCSCCIVNNSNGSRTIILYDTNLPDVSAKDFEKVDLTRFKWIHIEGRNASEQVKMLQRIEQYNATQPLQQKVRVSVEIEKPREELFQLFGYGEVVFVSKDVAKHLGFRSAGEALKGLYSRVKKGATLICAWAEEGADALGPDGQLLHSDAFPPPRVVDTLGAGDTFNASVIFSLSKGNSMQEALRFGCQVAGKKCGLQGFDGIV

SEQ ID NO: 1378 - protein, 112 aa, Homo sapiens
MSDAAVDTSSEITTKDLKEKKEVVEEAENGRDAPANGNAQNEENGEQEADNEVDEEEEEGGEEEEEEEEGDGEEEDGDEDEEAEAPTGKRVAEDDEDDDVETKKQKKTDEDD

SEQ ID NO: 1379 - protein, 295 aa, Homo sapiens
METSMPEYYDVFGDFHGFLMDKRFTKYWEDVETFLARPDDLLIVTYPKSGSTWISEIVDMIYKEGDVEKCKEDALFNRIPDLECRNEDLINGIKQLKEKESPRIVKTHLPAKLLPASFWEKNCKIIYLCRNAKDVVVSYYYFFLIMKSYPNPKSFSEFVEKFMEGQVPYGSWYDHVKSWWEKSKNSRVLFMFYEDMKEDIRREVVKLIEFLERDPSAELVDRIIQHTSFQEMKNNPCTNYSMLPETMIDLKVSPFMRKGIVGDWKNHFPEALRERFEEHYQQQMKDCPVKFRAEL

SEQ ID NO: 1380 - protein, 359 aa, Homo sapiens [sequence omitted]

SEQ ID NO: 1381 - protein, 359 aa, Homo sapiens [sequence omitted]

SEQ ID NO: 1382 - protein, 547 aa, Homo sapiens
MPSGTSQCEDGSAGCPQDLEVQPEKGQLEKGASGDKERVWISPDTPSRCTWQLGRPMADSPHYHTVPTKSPKILPDILRKIGNTPMVRINRISKNAGLKCELLAKCEFFNAGGSVKDRISLRMIEDAERAGTLKPGDTIIEPTSGNTGIGLALAAAVKGYRCIIVMPEKMSMEKVDVLRALGAEIVRTPTNARFDSPESHVGVAWRLKNEIPNSHILDQYRNASNPLAHYDDTAEEILQQCDGKVDMLVASAGTGGTITGIARKLKEKCPGCKIIGVDPEGSILAEPEELNQTEQTAYEVEGIGYDFIPTVLDRAVVDRWFKSNDDDSFAFARMLISQEGLLCGGSSGSAMAVAVKAAQELKEGQRCVVILPDSVRNYMSKFLSDKWMLQKGFMKEELSVKRPWWWHLRVQELSPSAPLTVLPTVTCEHTIAILREKGFDQAPVVNESGAILGMVTLGNMLSSLLAGKVRPSDEVCKVLYKQFKPIHLTDTLGMLSHILEMDHFALVVHEQIQYRNNGVSSKQLMVFGVVTAIDLLNFVAAREQTRK

SEQ ID NO: 1383 - protein, 133 aa, Homo sapiens [sequence omitted]

SEQ ID NO: 1384 - protein, 373 aa, Homo sapiens; identical to SEQ ID NO: 1229

SEQ ID NO: 1385 - protein, 373 aa, Homo sapiens; identical to SEQ ID NO: 1229

SEQ ID NO: 1386 - protein, 147 aa, Homo sapiens
MVHLTDAEKATVNGLWGKVNPVEIGAESLASLLIVYPWTQRYFSKFGDLSSVSAIMGNPQVKAHGEKVINAFDDGLKHLDNLKGTFASLSELHCDKLHVDPENFRLLGNMIVIMMGHHLGKEFTPSAQAAFQKVVAGVASALAHKYH

SEQ ID NO: 1387 - protein, 416 aa, Homo sapiens
MEFVKCLGHPEEFYNLLRFRMGGRRNFIPKMDRNSLSNSLKTCYKYLDQTSRSFAAVIQALDGDIRHAVCVFYLILRAMDTVEDDMAISVEKKIPLLRNFHTFLYEPEWRFTESKEKHRVVLEDFPTISLEFRNLAEKYQTVIADICHRMGCGMAEFLNKDVTSKQDWDKYCHYVAGLVGIGLSRLFSASEFEDPIVGEDTECANSMGLFLQKTNIIRDYLEDQQEGRQFWPQEVWGKYVKKLEDFVKPENVDVAVKCLNELITNALQHIPDVITYLSRLRNQSVFNFCAIPQVMAIATLAACYNNHQVFKGVVKIRKGQAVTLMMDATNMPAVKAIIYQYIEEIYHRVPNSDPSASKAKQLISNIRTQSLPNCQLISRSHYSPIYLSFIMLLAALSWQYLSTLSQVTEDYVQREH

SEQ ID NO: 1388 - protein, 416 aa, Homo sapiens; identical to SEQ ID NO: 1387

SEQ ID NO: 1389 - protein, 1472 aa, Homo sapiens
MGKHRLRSLALLPLLLRLLLLLLPTDASAPQKPIYMVMVPSLLHAGTPEKACFLFSHLNETVAVRVSLESVHGNQSLFTDLVVDKDLFHCTSFTVPQSSSDELMFFTVQVKGATHEFRRQSTVLVKKKESLVFAQTDKPIYKPGQTVRFRVVSLDESFHPLNELIPLLYIQDPKNNRIAQWQNFNLEGGLKQLSFPLSSEPTQGSYKVVIRTESGRTVEHPFSVEEFVLPKFEVRVTVPETITILEEEMNVSVCGIYTYGKPVPGRVTVNICRKYSNPSNCFGEESVAFCEKLSQQLDGRGCFSQLVKTKSFQLKRQEYEMQLDVHAKIQEEGTGVEETGKGLTKITRTITKLSFVNVDSHFRQGIPFVGQVLLVDGRGTPIPYETIFIGADEANLYINTTTDKHGLARFSINTDDIMGTSLTVRAKYKDSNACYGFRWLTEENVEAWHTAYAVFSPSRSFLHLESLPDKLRCDQTLEVQAHYILNGEAMQELKELVFYYLMMAKGGIVRAGTHVLPLKQGQMRGHFSILISMETDLAPVARLVLYAILPNGEVVGDTAKYEIENCLANKVDLVFRPNSGLPATRALLSVMASPQSLCGLRAVDQSVLLMKPETELSASLIYDLLPVKDLTGFPQGADQREEDTNGCVKQNDTYINGILYSPVQNTNEEDMYGFLKDMGLKVFTNSNIRKPKVCERLRDNKGIPAAYHLVSQSHMDAFLESSESPTETRRSYFPETWIWDLVVVDSAGVAEVEVTVPDTITEWKAGAFCLSNDTGLGLSPVVQFQAFQPFFVELTMPYSVIRGEAFTLKATVLNYLPTCIRVAVQLEASPDFLAAPEEKEQRSHCICMNQRHTASWAVIPKSLGNVNFTVSAEALNSKELCGNEVPVVPEQGKKDTIIKSLLVEPEGLENEVTFNSLLCPMGAEVSELIALKLPSDVVEESARASVTVLGDILGSAMQNTQDLLKMPYGCGEQNMVLFAPNIYVLDYLNETQQLTQEIKTKAIAYLNTGYQRQLNYKHRDGSYSAFGDKPGRNHANTWLTAFVLKSFAQARKYIFIDEVHITQALLWLSQQQKDNGCFRSSGSLLNNAMKGGVEDEVTLSAYITIALLEMSLPVTHPVVRNALFCLDTAWKSARGGAGGSHVYTKALLAYAFALAGNQDTKKEILKSLDEEAVKEEDSVHWTRPQKPSVSVGLWYQPQATSAEVEMTAYVLLAYLTTEPAPTQEDLTAAMLIVKWLTKQQNSHGGFSSTQDTVVALHALSKYGSATFTRAKKAAQVTIRSSGTFSTKFQVNNNNQLLLQRVTLPTVPGDYTVKVTGEGCVYLQTSLKYSVLPREEEFPFAVVVQTLPGTCEDPKAHTSFQISLNISYTGSRSESNMAIADVKMVSGFIPLKPTVKMLERSVHVSRTEVSNNHVLIYLDKVSNQTVNLSFTVQQDIPIRDLKPAVVKVYDYYEKDEFAVAKYSAPCSTDYGNA

SEQ ID NO: 1390 - protein, 1472 aa, Homo sapiens; identical to SEQ ID NO: 1389

SEQ ID NO: 1391 - protein, 1472 aa, Homo sapiens; identical to SEQ ID NO: 1389

SEQ ID NO: 1392 - protein, 434 aa, Homo sapiens
MSESVGRTSAMHRLQVVLGHLAGRPESSSALQAAPCSATFPQASASDVVVVHGRRTPIGRAGRGGFKDTTPDELLSAVLTAVLQDVKLKPECLGDISVGNVLEPGAGAVMARIAQFLSGIPETVPLSAVNRQCSSGLQAVANIAGGIRNGSYDIGMACGVESMSLSNRGNPGNISSRLLESDKARDCLIPMGITSENVAERFGISRQKQDAFALASQQKAASAQSKGCFRAEIVPVTTTVLDDKGDRKTITVSQDEGVRPSTTMEGLAKLKPAFKDGGSTTAGNSSQVSDGAAAVLLARRSKAEELGLPILGVLRSYAVVGVPPDIMGIGPAYAIPAALQKAGLTVNDIDIFEINEAFASQALYCVEKLGIPAEKVNPLGGAIALGHPLGCTGARQVVTLLNELKRRGTRAYGVVSMCIGTGMGAAAVFEYPGN

SEQ ID NO: 1393 - protein, 434 aa, Homo sapiens; identical to SEQ ID NO: 1392

SEQ ID NO: 1394 - protein, 611 aa, Homo sapiens
MKQPATMKWSASISFLLLLNFAEPRVLHTNEFGIESTLDSSQCPTEKNMFNVATIVVAQFVQDATKAEVNKMSSDALAAMKENTGDGCLENQLSVFLDEICHETELSNKYGFSGCCNQSGVERHQCLLARKKTAPDSVPPFHFPETAESCPAYEENRAMSINTFIYDVSKRNPFLYAPTILYLAAQYDKAVPACCKADNMEECFQTKRASMAKELREGSMLNEHVCAVIRKFGSRNLQAVLIIKLSQKFPKANITEIRKLALDVAHIHEQCCHGNAMECLQDGESVMTHMCSQQEILSSKTAECCKLPTIELGYCIIHAENGDKPEGLTLNPSEFLGDRNFAQFSSEEKLLFMASFLHEYSRNHPNLPVSVILKTAKSYQEILEKCSQSETPSKCQDNMEEELQKHIQESQALAKQSCNLYQKLGPYYLQNLFLIGYTRKAPQLTSAELIDLTGKMVSIASTCCQLSEEKRSACGEGLADIYIGHLCLRHEANPVNSGINHCCSSSYSNRRLCITSFLRDETYVPPPFSEDKFIFHKDLCQAQGRALQTMKQELLINLVKQKPEMTEEQHAAVTADFSGLLEKCCKDQDQEACFAKEGPKLISKTREALGV

SEQ ID NO: 1395 - protein, 611 aa, Homo sapiens; identical to SEQ ID NO: 1394

SEQ ID NO: 1396 - protein, 1023 aa, Homo sapiens
MGKGVGRDKYEPAAVSEHGDKKSKKAKKERDMDELKKEVSMDDHKLSLDELHRKYGTDLSRGLTPARAAEILARDGPNALTPPPTTPEWVKFCRQLFGGFSMLLWIGAILCFLAYGIRSATEEEPPNDDLYLGVVLSAVVIITGCFSYYQEAKSSKIMESFKNMVPQQALVIRNGEKMSINAEDVVVGDLVEVKGGDRIPADLRIISANGCKVDNSSLTGESEPQTRSPDFTNENPLETRNIAFFSTNCVEGTARGIVVYTGDRTVMGRIATLASGLEGGQTPIAEEIEHFIHLITGVAVFLGVSFFILSLILEYTWLEAVIFLIGIIVANVPEGLLATVTVCLTLTAKRMARKNCLVKNLEAVETLGSTSTICSDKTGTLTQNRMTVAHMWFDNQIHEADTTENQSGVSFDKTSATWFALSRIAGLCNRAVFQANQENLPILKRAVAGDASESALLKCIEVCCGSVMEMREKYTKIVEIPFNSTNKYQLSIHKNPNASEPKHLLVMKGAPERILDRCSSILLHGKEQPLDEELKDAFQNAYLELGGLGERVLGFCHLLLPDEQFPEGFQFDTDEVNFPVDNLCFVGLISMIDPPRAAVPDAVGKCRSAGIKVIMVTGDHPITAKAIAKGVGIISEGNETVEDIAARLNIPVNQVNPRDAKACVVHGSDLKDMTSEELDDILRYHTEIVFARTSPQQKLIIVEGCQRQGAIVAVTGDGVNDSPALKKADIGVAMGIVGSDVSKQAADMILLDDNFASIVTGVEEGRLIFDNLKKSIAYTLTSNIPEITPFLIFIIANIPLPLGTVTILCIDLGTDMVPAISLAYEQAESDIMKRQPRNPKTDKLVNERLISMAYGQIGMIQALGGFFTYFVILAENGFLPFHLLGIRETWDDRWINDVEDSYGQQWTYEQRKIVEFTCHTAFFVSIVVVQWADLVICKTRRNSVFQQGMKNKILIFGLFEETALAAFLSYCPGMGAALRMYPLKPTWWFCAFPYSLLIFVYDEVRKLIIRRRPGGWVEKETYY

SEQ ID NO: 1397 - protein, 1198 aa, Homo sapiens
MGDMTNSDFYSKNQRNESSHGGEFGCSMEELRSLMELRGTEAVVKIKETYGDTESICRRLKTSPVEGLPGTAPDLEKRKQIFGQNFIPPKKPKTFLQLVWEALQDVTLIILEIAAIISLGLSFYHPPGESNEGCATAQGGAEDEGEAEAGWIEGAAILLSVICVVLVTAFNDWSKEKQFRGLQSRIEQEQKFTVVRAGQVVQIPVAEIVVGDIAQIKYGDLLPADGLFIQGNDLKIDESSLTGESDQVRKSVDKDPMLLSGTHVMEGSGRMVVTAVGVNSQTGIIFTLLGAGGEEEEKKDKKAKQQDGAAAMEMQPLKSAEGGDADDKKKANMHKKEKSVLQGKLTKLAVQIGKAGLVMSAITVIILVLYFTVDTFVVNKKPWLTECTPVYVQYFVKFFIIGVTVLVVAVPEGLPLAVTISLAYSVKKMMKDNNLVRHLDACETMGNATAICSDKTGTLTTNRMTVVQAYVGDVHYKEIPDPSSINAKTLELLVNAIAINSAYTTKILPPEKEGALPRQVGNKTECGLLGFVLDLRQDYEPVRSQMPEEKLYKVYTFNSVRKSMSTVIKMPDESFRMYSKGASEIVLKKCCKILSGAGEPRVFRPRDRDEMVKKVIEPMACDGLRTICVAYRDFPSSPEPDWDNENDILNELTCICVVGIEDPVRPEVPEAIRKCQRAGITVRMVTGDNINTARAIAIKCGIIHPGEDFLCLEGKEFNRRIRNEKGEIEQERIDKIWPKLRVLARSSPTDKHTLVKGIIDSTHTEQRQVVAVTGDGTNDGPALKKADVGFAMGIAGTDVAKEASDIILTDDNFSSIVKAVMWGRNVYDSISKFLQFQLTVNVVAVIVAFTGACITQDSPLKAVQMLWVNLIMDTFASLALATEPPTETLLLRKPYGRNKPLISRTMMKNILGHAVYQLTLIFTLLFVGEKMFQIDSGRNAPLHSPPSEHYTIIFNTFVMMQLFNEINARKIHGERNVFDGIFRNPIFCTIVLGTFAIQIVIVQFGGKPFSCSPLQLDQWMWCIFIGLGELVWGQVIATIPTSRLKFLKEAGRLTQKEEIPEEELNEDVEEIDHAERELRRGQILWFRGLNRIQTQIRVVKAFRSSLYEGLEKPESRTSIHNFMAHPEFRIEDSQPHIPLIDDTDLEEDAALKQNSSPPSSLNKNNSAIDSGINLTTDTSKSATSSSPGSPIHSLETSL

SEQ ID NO: 1398 - protein, 558 aa, Homo sapiens
MSLTAALWVAVFGKCGPPPDLPYALPASEMNQTDFESHTTLRYNCRPGYSRASSSQSLYCKPLGKWQINIACVKKSCRNPGDLQNGKVEVKTDFLFGSQIEFSCSEGYILIGSSTSYCEIQGKGVSWSDPLPECVIAKCGMPPDISNGKHNGREEEFFTYRSSVTYKCDPDFTLLGNASITCTVVNKTVGVWSPSPPTCERIICPWPKVLHGTINSGFKHTYKYKDSVRFVCQKGFVLRGSGVIHCEADGSWSPVPVCELNSCTDIPDIPNAALITSPRPRKEDVYPVGTVLRYICRPGYEPATRQPMTVICQKDLSWSMLRGCKEICCPVPDPKSVRVIQHEKAHPDNDCTYFFGDEVSYTCQNDIMLTATCKSDGTWHPRTPSCHQSCDFPPAIAHGRYTKSSSYYVRTQVTYECEEGYRLVGEATISCWYSQWTPAAPQCKALCRKPEIGNGVLSTNKDQYVETENVTIQCDSGFVMLGSQSITCSENGTWYPKVSRCEQEVPKDCEHVFAGKKLMQCLPNSNDVKMALEVYKLTLEIKQLQLQIDKAKHVDREL

SEQ ID NO: 1399 - protein, 524 aa, Homo sapiens; identical to SEQ ID NO: 1279

SEQ ID NO: 1400 - protein, 513 aa, Homo sapiens
MAFSQYISLAPELLLATAIFCLVFWVLRGTRTQVPKGLKSPPGPWGLPFIGHMLTLGKNPHLSLTKLSQQYGDVLQIRIGSTPVVVLSGLNTIKQALVKQGDDFKGRPDLYSFTLITNGKSMTFNPDSGPVWAARRRLAQDALKSFSIASDPTSVSSCYLEEHVSKEANHLISKFQKLMAEVGHFEPVNQVVESVANVIGAMCFGKNFPRKSEEMLNLVKSSKDFVENVTSGNAVDFFPVLRYLPNPALKRFKNFNDNFVLSLQKTVQEHYQDFNKNSIQDITGALFKHSENYKDNGGLIPQEKIVNIVNDIFGAGFETVTTAIFWSILLLVTEPKVQRKIHEELDTVIGRDRQPRLSDRPQLPYLEAFILEIYRYTSFVPFTIPHSTTRDTSLNGFHIPKECCIFINQWQVNHDEKQWKDPFVFRPERFLTNDNTAIDKTLSEKVMLFGLGKRRCIGEIPAKWEVFLFLAILLHQLEFTVPPGVKVDLTPSYGLTMKPRTCEHVQAWPRFSK

SEQ ID NO: 1401 - protein, 513 aa, Homo sapiens; identical to SEQ ID NO: 1400

SEQ ID NO: 1402 - protein, 513 aa, Homo sapiens; identical to SEQ ID NO: 1400

SEQ ID NO: 1403 - protein, 508 aa, Homo sapiens
MDNYPKLEEMMLLSNGAPQFLGAAGTPEGSGGNNSSSSSSSSSGGGGGGGSNSGSSAFNPQGEPSEQPYEHLTTESFSDIALNNEKALVETSYPSQTTRLPPITYTGRFSLEPAPNSGNTLWPEPLFSLVSGLVSMTNPPTSSSSAPSPAASSSSSASQSPPLSCAVPSNDSSPIYSAAPTFPTPNTDIFPEPQSQAFPGSAGTALQYPPPAYPATKGGFQVPMIPDYLFPQQQGDLSLGTPDQKPFQGLENRTQQPSLTPLSTIKAFATQSGSQDLKALNNTYQSQLIKPSRMRKYPNRPSKTPPHERPYACPVESCDRRFSRSDELTRHIRIHTGQKPFQCRICMRNFSRSDHLTTHIRTHTGEKPFACDICGRKFARSDERKRHTKIHLRQKDKKADKSVVASSAASSLSSYPSPVATSYPSPATTSFPSPVPTSYSSPGSSTYPSPAHSGFPSPSVATTYASVPPAFPAQVSTFQSAGVSNSFSTSTGLSDMTATFSPRTIEIC

SEQ ID NO: 1404 - protein, 508 aa, Homo sapiens; identical to SEQ ID NO: 1403

SEQ ID NO: 1405 - protein, 266 aa, Homo sapiens
MLRFLVFASLVLYGHSTQDFPETNARVVGGAEARRNSWPSQISLQYLSGGSWYHTCGGTLIRRNWVMTAAHCVSSQMTFRVVVGDHNLSQNDGTEQYVSVQKIVVHPNWNSNNVAAGYDIALLRLAQSVTLNNYVQLAVLPQEGTILANNNPCYITGWGRTRTNGQLSQTLQQAYLPSVDYSICSSSSYWGSTVKTTMVCAGGDGVRSGCQGDSGGPLHCLVNGQYSVHGVTSFVSSMGCNVSRKPTVFTRVSAYISWMNNVIAYN

SEQ ID NO: 1406 - protein, 127 aa, Homo sapiens
MNFSGKYQVQSQENFEPFMKAMGLPEDLIQKGKDIKGVSEIVHEGKKVKLTITYGSKVIHNEFTLGEECELETMTGEKVKAVVKMEGDNKMVTTFKGIKSVTEFNGDTITNTMTLGDIVYKRVSKRI

SEQ ID NO: 1407 - protein, 437 aa, Homo sapiens
MNWSLQLRSFILCWALLLLSPTGLAQYTATRDNCCILDERFGSYCPTTCGISDFLNSYQTDVDTDLQTLENILQRAENRTTEAKELIKAIQVYYNPDQPPKPGMIEGATQKSKKMVEEILKYEALLLTHESSIRYLQDIYTSNKQKITNLKQKVAQLEALCQEPCKDSVRIYDITGKDCQDTANKGAKESGLYSIRPLKATEQFLVYCETDGPGNGWTEFKKRLDGSVDFLKNWIQYKEGFGHLSPTGTTEFWLGNEKNHLISMQSTIPYALRIQLKDWSGRTSTADYAMFRVGPESDKYRLTYAYFIGGDAGDAFDGYDFGDDPSDKFFTSHNGMHFSTWDNDNDKFEGNCAEQDGSGWWMNKCHAGHLNGVYYQGGTYSKSSTPNGYDNGIIWATWKTRWYSMKETTMKIIPFNRLSIGDGQQHHMGGSKQVGDM

SEQ ID NO: 1408 - protein, 437 aa, Homo sapiens; identical to SEQ ID NO: 1407

SEQ ID NO: 1409 - protein, 437 aa, Homo sapiens; identical to SEQ ID NO: 1407

SEQ ID NO: 1410 - protein, 462 aa, Homo sapiens
MWDLKSEWWAVGFGLLLLLAASAQAGGLAPHHYTPDWPSLDSRPLPRWFDEAKFGLFVHWGVYSVPAWGSEWFWWHWQGEQSSAYVRFMKENYPPGFSYADFAPQFTARFFHPEEWADLFQAAGAKYVVLTAKHHEGFTNWPSAVSWNWNSKDVGPHRDLVGELGAAVRKRNIRYGLYHSLFEWFHPLYLLDKKNGLKTQHFVSTKTMPELYDLVNRYKPDLIWSDGEWECPDSYWNSTEFLAWLYNESPVKDQVVVNDRWGQNCSCRHGGYYNCEDKYRPHSLPDHKWEMCTSVDKASWGYRRDMSMSTIVDENEIIEELVQTISLGGNYLLNIGPNKDGVIVPIFQERLLAVGKWLQINGEAIYASKPWRVQSERNKTVVWYTTKDSAVYATFLHWPEDGVVNLQSPKMTSATKITMLGMEGELHWTQDPLEGVLITLPQLPPGTFPVESAWTLKLTKVN

SEQ ID NO: 1411 - protein, 194 aa, Homo sapiens
MTENSTSTPAAKPKRAKAAKKSTDHPKYSDMIVAAIQAEKNRAGSSRQSIQKYIKSHYKVGENADSQIKLSIKRLVTTGVLKQTKGVGASGSFRLAKGDEPKRSVAFKKTKKEVKKVATPKKAAKPKKAASKAPSKKPKATPVKKAKKKPAATPKKAKKPKIVKVKPVKASKPKKAKPVKPKAKSSAKRASKKK

SEQ ID NO: 1412 - protein, 194 aa, Homo sapiens; identical to SEQ ID NO: 1411

SEQ ID NO: 1413 - protein, 289 aa, Homo sapiens
MERPQLDSMSQDLSEALKEATKEVHIRAENSEFMRNFQKGQVSREGFKLVMASLYHIYTALEEEIERNKQNPVYAPLYFPEELHRRAALEQDMAFWYGPHWQEAIPYTPATQHYVKRLHEVGGTHPELLVAHAYTRYLGDLSGGQVLKKIAQKAMALPSSGEGLAFFTFPSIDNPTKFKQLYRARMNTLEMTPEVKHRVTEEAKTAFLLNIELFEELQALLTEEHKDQSPSQTEFLRQRPASLVQDTTSAETPRGKSQISTSSSQTPLLRWVLTLSFLLATVAVGIYAM

SEQ ID NO: 1414 - protein, 289 aa, Homo sapiens; identical to SEQ ID NO: 1413

SEQ ID NO: 1415 - protein, 424 aa, Homo sapiens
MATAVRLLGRRVSSWRLRPLPSPLAVPQRAHSMLPVDDDINGLNEEQKQLRHTISKFVQENLAPKAQEIDQSNDFKNLREFWKQLGSLGVLGITAPVQYGGSGLGYLEHVLVMEEISRASAAVGLSYGAHSNLCINQIVRNGNEAQKEKYLPKLISGEFIGALAMSEPNAGSDVVSMRLKAEKKGDHYVLNGNKFWITNGPDADVLVVYAKTDLTAVPASRGITAFIVEKDMPGFSTSKKLDKLGMRGSNTCELVFEDCKVPAANILSQESKGVYVLMSGLDLERLVLAGGPLGIMQAVLDHTIPYLHVREAFGQKIGQFQLMQGKMADMYTRLMACRQYVYNVARACDEGHITAKDCAGVILYTAECATQVALDGIQCLGGNGYINDFPMGRFLRDAKLYEIGGGTSEVRRLVIGRAFNADFR

SEQ ID NO: 1416 - protein, 424 aa, Homo sapiens; identical to SEQ ID NO: 1415

SEQ ID NO: 1417 - protein, 494 aa, Homo sapiens
MGNHLQISVSLVLCIFIQSSACGQGVGTEPFGRNLGATEERKPLQKPEIRFLLFKDESDRLGCQLRPQHPETLQECGFNSSHPLVMIIHGWSVDGLLETWIWKIVGALKSRQSQPVNVGLVDWISLAYQHYAIAVRNTRVVGQEVAALLLWLEESMKFSRSKVHLIGYSLGAHVSGFAGSSMGGKRKIGRITGLDPAGPMFEGTSPNERLSPDDANFVDAIHTFTREHMGLSVGIKQPIAHYDFYPNGGSFQPGCHFLELYKHIAEHGLNAITQTINCAHERSVHLFIDSLQHSNLQNTGFQCSNMDSFSQGLCLNCKKGRCNSLGYDIRRIGHVKSKTLFLITRAQSPFKVYHYQFKIQFINQMEKPMEPTFTMTLLGTKEEIKKIPITLGEGITSNKTYSLLITLNKDIGELIMLKFKWENSAVWANVWNTVQTIMLWDTEPHYAGLIVKTIWVKAGETQQRMTFCPDNVDDLQLHPTQEKVFVKCDLKSKD

SEQ ID NO: 1418 - protein, 238 aa, Homo sapiens
MLLLPLLVLLCVVSVSSSGSQTCEETLKTCSVIACGRDGRDGPKGEKGEPGQGLRGLQGPPGKLGPPGSVGAPGSQGPKGQKGDRGDSRAIEVKLANMEAEINTLKSKLELTNKLHAFSMGKKSGKKFFVTNHERMPFSKVKALCSELRGTVAIPKNAEENKAIQEVAKTSAFLGITDEVTEGQFMYVTGGRLTYSNWKKDEPNDHGSGEDCVTIVDNGLWNDISCQASHTAVCEFPA

SEQ ID NO: 1419 - protein, 586 aa, Homo sapiens
MDPRAPRRRHTHQRGYLLTRDPHLNKDLAFTLEERQQLKIHGLLPPCIVNQEIQVLRVIKNFERLNSDFDRYLLLMDLQDRNEKLFYSVLMSNVEKFMPIVYTPTVGLACQQYSLAFRKPRGLFISIHDKGHIASVLNAWPEDVVKAIVVTDGERILGLGDLGCNGMGIPVGKLALYTACGGVNPQQCLPITLDVGTENEELLKDPLYIGLRHRRVRGPEYDAFLDEFMEAASSKYGMNCLIQFEDFANLNAFRLLNKYRNKYCTFNDDIQGTASVAVAGLLAALRITKNKLSDQTVLFQGAGEAALGIAHLIVMAMEKEGLSKEKARQKIWLVDSKGLIVKGRASLTEEKEVFAHEHEEMKNLEAIVQKIKPTALIGVAAIGGAFTEQILKDMAAFNERPIIFALSNPTSKAECSAEECYKVTKGRAIFASGSPFDPVTLPDGRTLFPGQGNNSYVFPGVALGVVACGLRHINDSVFLTTAEVISQQVSDKHLEEGRLYPPLNTIRDVSLKIAVKIVQDAYKEKMATVYPEPQNKEEFVSSQMYSTNYDQILPDCYSWPEEVPENTDQSQSVTQQLEFLTLLIRS

SEQ ID NO: 1420 - protein, 586 aa, Homo sapiens; identical to SEQ ID NO: 1419

SEQ ID NO: 1421 - protein, 586 aa, Homo sapiens; identical to SEQ ID NO: 1419

SEQ ID NO: 1422 - protein, 586 aa, Homo sapiens; identical to SEQ ID NO: 1419

SEQ ID NO: 1423 - protein, 453 aa, Homo sapiens
MAAVVLENGVLSRKLSDFGQETSYIEDNSNQNGAISLIFSLKEEVGALAKVLRLFEENDINLTHIESRPSRLNKDEYEFFTYLDKRTKPVLGSIIKSLRNDIGATVHELSRDKEKNTVPWFPRTIQELDRFANQILSYGAELDADHPGFKDPVYRARRKQFADIAYNYRHGQPIPRVEYTEEEKQTWGTVFRTLKALYKTHACYEHNHIFPLLEKYCGFREDNIPQLEDVSQFLQTCTGFRLRPVAGLLSSRDFLGGLAFRVFHCTQYIRHGSKPMYTPEPDICHELLGHVPLFSDRSFAQFSQEIGLASLGAPDEYIEKLATIYWFTVEFGLCKEGDSIKAYGAGLLSSFGELQYCLSDKPKLLPLELEKTACQEYSVTEFQPLYYVAESFSDAKEKVRTFAATIPRPFSVRYDPYTQRVEVLDNTQQLKILADSINSEVGILCNALQKIKS

SEQ ID NO: 1424 - protein, 471 aa, Homo sapiens
MSREMGELTQTRLQKIWIPHSSSSSVLQRRRGSSIPQFTNSPTMVIMVGLPARGKTYISTKLTRYLNWIGTPTKVFNLGQYRREAVSYRNYEFFRPDNTEAQLIRKQCALAALKDVHKYLSREEGHVAVFDATNYTRERRSLILQFAKEHGYKVFFIESICNDPEIIAENIKQVKLGSPDYIDCDQEKVLEDFLKRIECYEINYQPLDEELDSHLSYIKIFDVGTRYMVNRVQDHVQSRTAYYLMNIHVTPRSIYLCRHGESELNLRGRIGGDSGLSARGKQYAYALANFIRSQGISSLKVWTSHMKRTIQTAEALGVPYEQWKALNEIDAGVCEEMTYEEIQEHYPEEFALRDQDKYRYRYPKGESYEDLVQRLEPVIMELERQENVLVICHQAVMRCLLAYFLDKSSDELPYLKCPLHTVLKLTPVAYGCRVESIYLNVEAVNTHRDKPENVDITREAEEALDTVPAHY

SEQ ID NO: 1425 - protein, 471 aa, Homo sapiens; identical to SEQ ID NO: 1424

SEQ ID NO: 1426 - protein, 1275 aa, Homo sapiens
MEFEEGLNGTADKNFSKMGKKSKKEKEKKPAVGIFGMFRYADWLDKLCMALGTLAAIIHGTLLPLLMLVFGYMTDSFTQAETRILPSVTNQSEINSTQTVSDSSLEEDMAMYAYYYTGIGAGVLIVAYIQVSLWCLAAGRQIHKIRQKFFHAIMNQEIGWFDVNDAGELNTRLTDDVSKINDGIGDKLGMFFQSITTFSAGFIIGFISGWKLTLVILAVSPLIGLSSAMWAKVLTSFTNKELQAYAKAGAVAEEVLAAIRTVIAFGGQKKELERYNKNLEEAKRVGIKKAITANISIGIAYLLVYASYALAFWYGTSLVLSNEYSIGQVLTVFFSILLGTFSIGHLAPNIEAFANARGAAYEIFKIIDNEPSIDSFSTKGHKPDSIMGNLEFKNVYFNYPSRSEVKILKGLNLKVKSGQTVALVGNSGCGKSTTVQLLQRLYDPIEGEVSIDGQDIRTINVRYLREIIGVVSQEPVLFATTIAENIRYGRENVTMDEIEKAVKEANAYDFIMKLPHKFNTLVGERGAQLSGGQKQRIAIARALVRNPKILLLDEATSALDTESEAVVQAALDKAREGRTTIVIAHRLSTVRNADVIAGFDGGVIVEQGNHEELMKEKGIYFKLVMTQTRGNEIEPGNNAYESQSDTGASELTSEKSKSPLIRRSIRRSIHRRQDQERRLSSKEDVDEDVPMVSFWQILKLNISEWPYLVVGVLCAVINGCIQPVFAIVFSKIVGVFSRDDDHETKQRNCNLFSLLFLVMGMISFVTYFFQGFAFGKAGEILTKRLRYMVFKSMLRQDISWFDDHKNTTGSLTTRLASDASNVKGAMGSRLAVVTQNVANLGTGIILSLVYGWQLTLLLVVIIPLIVLGGIIEMKLLSGQALKDKKELEISGKIATEAIENFRTVVSLTREQKFETMYAQSLQIPYRNALKKAHVFGITFAFTQAMIYFSYAACFRFGAYLVARELMTFENVMLVFSAVVFGAMAAGNTSSFAPDYAKAKVSASHIIRIIEKIPEIDSYSTEGLKPNWLEGNVKFNGVMFNYPTRPNIPVLQGLSFEVKKGQTLALVGSSGCGKSTVVQLLERFYNPMAGTVFLDGKEIKQLNVQWLRAHLGIVSQEPILFDCSITENIAYGDNSRVVSHEEIVRAAREANIHQFIDSLPEKYNTRVGDKGTQLSGGQKQRIAIARALVRQPHILLLDEATSALDTESEKVVQEALDKAREGRTCIVIAHRLSTIQNADLIVVIQNGQVKEHGTHQQLLAQKGIYFSMVQAGAKRS

SEQ ID NO: 1427 - protein, 543 aa, Homo sapiens
MEGPAGYLRRASVAQLTQELGTAFFQQQQLPAAMADTFLEHLCLLDIDSQPVAARSTSIIATIGPASRSVDRLKEMIKAGMNIARLNFSHGSHEYHAESIANIREATESFATSPLSYRPVAIALDTKGPEIRTGVLQGGPESEVEIVKGSQVLVTVDPKFQTRGDAKTVWVDYHNITRVVAVGGRIYIDDGLISLVVQKIGPEGLVTEVEHGGILGSRKGVNLPNTEVDLPGLSEQDLLDLRFGVQHNVDIIFASFVRKASDVLAVRDALGPEGQNIKIISKIENHEGVKKFDEILEVSDGIMVARGDLGIEIPAEKVFLAQKMMIGRCNLAGKPVVCATQMLESMITKARPTRAETSDVANAVLDGADCIMLSGETAKGSFPVEAVMMQHAIAREAEAAVYHRQLFEELRRAAPLSRDPTEVTAIGAVEASFKCCAAAIIVLTKTGRSAQLLSQYRPRAAVIAVTGSAKAARQVHLSRGVFPLLYREPPEAIWADDVDRRVQFGIESGKLRGFLRVGDLVIVVTGWRPGSGYTNIMRVLSVS

SEQ ID NO: 1428 - protein, 432 aa, Homo sapiens
MEMEKEFEQIDKAGNWAAIYQDIRHEASDFPCRIAKLPKNKNRNRYRDVSPFDHSRIKLHQEDNDYINASLIKMEEAQRSYILTQGPLPNTCGHFWEMVWEQKSRGVVMLNRIMEKGSLKCAQYWPQKEEKEMVFDDTNLKLTLISEDVKSYYTVRQLELENLATQEAREILHFHYTTWPDFGVPESPASFLNFLFKVRESGSLSPEHGPIVVHCSAGIGRSGTFCLADTCLLLMDKRKDPSSVDIKKVLLEMRRFRMGLIQTADQLRFSYLAVIEGAKFIMGDSSVQDQWKELSHEDLEPPPEHVPPPPRPPKRTLEPHNGKCKELFSNHQWVSEESCEDEDILAREESRAPSIAVHSMSSMSQDTEVRKRMVGGGLQSAQASVPTEEELSPTEEEQKAHRPVHWKPFLVNVCMATALATGAYLCYRVCFH

SEQ ID NO: 1429 - protein, 432 aa, Homo sapiens; identical to SEQ ID NO: 1428

SEQ ID NO: 1430 - protein, 492 aa, Homo sapiens
MLDTGLLLVVILASLSVMLLVSLWQQKIRGRLPPGPTPLPFIGNYLQLNTKDVYSSITQLSERYGPVFTIHLGPRRVVVLYGYDAVKEALVDQAEEFSGRGEQATYNTLFKGYGVAFSSGERAKQLRRLSIATLRDFGVGKRGVEERILEEAGYLIKMLQGTCGAPIDPTIYLSKTVSNVISSIVFGERFDYEDTEFLSLLQMMGQMNRFAASPTGQLYDMFHSVMKYLPGPQQQIIKVTQKLEDFMIEKVRQNHSTLDPNSPRNFIDSFLIRMQEEKNGNSEFHMKNLVMTTLSLFFAGSETVSSTLRYGFLLLMKHPDVEAKVHEEIEQVIGRNRQPQYEDHMKMPYTQAVINEIQRFSNLAPLGIPRRIIKNTTFRGFFLPKATDVFPILGSLMTDPKFFPSPKDFDPQNFLDDKGQLKKNAAFLPFSTGKRFCLGDGLAKMELFLLLTTILQNFRFKFPMKLEDINESPKPLGFTRIIPKYTMSFMPI

SEQ ID NO: 1431 - protein, 492 aa, Homo sapiens; identical to SEQ ID NO: 1430

SEQ ID NO: 1432 - protein, 284 aa, Homo sapiens
MPDYTWFEGIPFPAFGIPKETLQNVCNKFVVKEEDLILLTYPKSGTNWLIEIVCLIQTKGDPKWIQSVTIWDRSPWIETDLGYDMLIKKKGPRLITSHLPMHLFSKSLFSSKAKVIYLIRNPRDVLVSGYYFWGKTTLAKKPDSLGTYVEWFLKGNVPYGSWFEHIRAWLSMRELDNFLLLYYEDMKKDTMGTIKKICDFLGKKLEPDELDLVLKYSSFQVMKENNMSNYNLMEKELILPGFTFMRNGTTGDWKNHFTVAQAEAFDKVFQEKMAGFPPGMFPWD

SEQ ID NO: 1433 - protein, 284 aa, Homo sapiens; identical to SEQ ID NO: 1432

SEQ ID NO: 1434 - protein, 284 aa, Homo sapiens; identical to SEQ ID NO: 1432

SEQ ID NO: 1435 - protein, 556 aa, Homo sapiens
MPTVDDVLEQVGEFGWFQKQAFLLLCLISASLAPIYVGIVFLGFTPGHYCQNPGVAELSQRCGWSQAEELNYTVPGLGPSDEASFLSQCMRYEVDWNQSTLDCVDPLSSLVANRSQLPLGPCEHGWVYDTPGSSIVTEFNLVCGDAWKVDLFQSCVNLGFFLGSLVVGYIADRFGRKLCLLVTTLVTSVSGVLTAVAPDYTSMLLFRLLQGMVSKGSWVSGYTLITEFVGSGYRRTTAILYQMAFTVGLVGLAGVAYAIPDWRWLQLAVSLPTFLFLLYYWFVPESPRWLLSQKRTTRAVRIMEQIAQKNGKVPPADLKMLCLEEDASEKRSPSFADLFRTPNLRKHTVILMYLWFSCAVLYQGLIMHVGATGANLYLDFFYSSLVEFPAAFIILVTIDRIGRIYPIAASNLVTGAACLLMIFIPHELHWLNVTLACLGRMGATIVLQMVCLVNAELYPTFIRNLGMMVCSALCDLGGIFTPFMVFRLMEVWQALPLILFGVLGLTAGAMTLLLPETKGVALPETIEEAENLGRRKSKAKENTIYLQVQTGKSSST

SEQ ID NO: 1436 - protein, 556 aa, Homo sapiens; identical to SEQ ID NO: 1435

SEQ ID NO: 1437 - protein, 494 aa, Homo sapiens
MPPAIGGPVGYTPPDGGWGWAVVVGAFISIGFSYAFPKSITVFFKEIEIIFSATTSEVSWISSIMLAVMYAGGPISSILVNKYGSRPVMIAGGCLSGCGLIAASFCNTVQELYFCIGVIGGLGLAFNLNPALTMIGKYFYKKRPLANGLAMAGSPVFLSTLAPLNQAFFGIFGWRGSFLILGGLLLNCCVAGSLMRPIGPQQGKVEKLKSKESLQEAGKSDANTDLIGGSPKGEKLSVFQTVNKFLDLSLFTHRGFLLYLSGNVVMFFGLFTPLVFLSNYGKSKHFSSEKSAFLLSILAFVDMVARPSMGLAANTRWIRPRVQYFFAASVVANGVCHLLAPLSTTYVGFCIYAGVFGFAFGWLSSVLFETLMDLVGPQRFSSAVGLVTIVECCPVLLGPPLLGRLNDMYGDYKYTYWACGVILIIAGLYLFIGMGINYRLVAKEQKAEEKKRDGKEDETSTDVDEKPKKTMKETQSPAPLQNSSGDPAEEESPV

SEQ ID NO: 1438 - protein, 494 aa, Homo sapiens; identical to SEQ ID NO: 1437

SEQ ID NO: 1439 - protein, 500 aa, Homo sapiens
MGLLIGDDLWAVVIFTAIFLLLVDLVHRHKFWTAHYPPGPVPLPGLGNLLQVDFENMPYSLYKLRSRYGDVFSLQIAWKPVVVINGLKAVRELLVTYGEDTADRPLLPIYNHLGYGDKSKGVVLAPYGPEWREQRRFSVSTLRDFGVGKKSLEQWVTEEAGHLCDTFAKEAEHPFNPSILLSKAVSNVIASLVYARRFEYEDPFFNRMLKTLKESFGEDTGFMAEVLNAIPILLQIPGLPGKVFPKLNSFIALVDKMLIEHKKSWDPAQPPRDMTDAFLAEMQKAKGNPESSFNDENLRLVVIDLFMAGMVTTSTTLSWALLLMILHPDVQRRVHEEIDEVIGQVRRPEMADQARMPFTNAVIHEVQRFADIVPTNIPHMTSRDIKFQGFLIPKGTTLIPNLSSVLKDETVWEKPLRFHPEHFLDAQGNFVKHEAFMPFSAGRRACLGEPLARMELFLFFTCLLQRFSFSVLAGRPRPSTHGVYALPVTPQPYQLCAVAR

SEQ ID NO: 1440 - protein, 397 aa, Homo sapiens
MQLLGRVICFVVGILLSGGPTGTISAVDPEANMNVTEIIMHWGYPEHSVQTGDGYILGVHRIPHGRKNQFDKGPKPVVYLQWRHGFLADSSNWVTNIDNNSLGFILADAGFDVWMGNSRGNTWSRKHKTLSVSQDEYWAFSFDEMAKYDLPASINYILNKTGQEQLYNVGHSQGCTIGFIAFSQMPELAKKVKMFFALAPVLSLNFASGPMVKLGRLPDLLLEDLFGQKQFLPQSAMVKWLSTHICTHVIMKELCANIFFLICGFNEKNLNMSRVDVYTTHCPAGTSVQNMVHWTQVVKYHKLQAFDWGSSDKNYFHYNQSYPPLYSIKDMQLPTALWSGGKDWLADTSDINILLTEIPTLVYHKNIPEWDHLDFIWGLDAPWRLYNEVVSLMKKYQ

SEQ ID NO: 1441 - protein, 397 aa, Homo sapiens; identical to SEQ ID NO: 1440

SEQ ID NO: 1442 - protein, 682 aa, Homo sapiens
MEAILKLFGEYFFKFCKMSGYDRMLRTLGGNLTEFIENLDALHSYLALSYQEMNAPSFRVEEGADGAMLLHYYSDRHGLCHIVPGIIEAVAKDFFDTDVAMSILDMNEEVERTGKKEHVVFLVVQKAHRQIRGAKASRPQGSEDSQADQEALQGTLLRMKERYLNIPVCPGEKSHSTAVRASVLFGKGPLRDTFQPVYPERLWVEEEVFCDAFPFHIVFDEALRVKQAGVNIQKYVPGILTQKFALDEYFSIIHPQVTFNISSICKFINSQFVLKTRKEMMPKARKSQPMLKLRGQMIWMESLRCMIFMCSPNVRSLQELEESKMHLSDIAPHDTTRDLILLNQQRLAEMELSCQLEKKKEELRVLSNHLAIEKKKTETLLYAMLPEHVANQLKEGRKVAAGEFETCTILFSDVVTFTNICAACEPIQIVNMLNSMYSKFDRLTSVHDVYKVETIGDAYMVVGGVPVPVESHAQRVANFALGMRISAKEVMNPVTGEPIQIRVGIHTGPVLAGVVGDKMPRYCLFGDTVNTASRMESHGLPSKVHLSPTAHRALKNKGFEIVRRGEIEVKGKGKMTTYFLIQNLNATEDEIMGRPSAPADGKEVCTPGNQVRKSPAVPRNTDHQQQVYKGDPADASNEVTLAGSPVAGRNSTDAVNNQPSPDETKTSVVASGPVLSAFCVVL

SEQ ID NO: 1443 - protein, 767 aa, Homo sapiens
MKTPWKVLLGLLGVAALVTIITVPVVLLNKDEAAADSARTYTLADYLKNTFRVKSYSLRWVSDSEYLYKQENNILLFNAEHGNSSIFLENSTFEIFGDSISDYSVSPDRLFVLLEYNYVKQWRHSYTASYSIYDLNKRQLITEEKIPNNTQWITWSQEGHKLAYVWKNDIYVKIEPHLPSHRITSTGKENVIFNGINDWVYEEEIFGAYSALWWSPNGTFLAYAQFNDTGVPLIEYSFYSDESLQYPKTVWIPYPKAGAVNPTVKFFIVNTDSLSSTTTTIPMQITAPASVTTGDHYLCDVAWVSEDRISLQWLRRIQNYSVMAICDYDKTTLVWNCPTTQEHIETSATGWCGRFRPAEPHFTSDGSSFYKIVSDKDGYKHICQFQKDRKPEQVCTFITKGAWEVISIEALTSDYLYYISNEYKEMPGGRNLYKIQLTDHTNKKCLSCDLNPERCQYYSVSLSKEAKYYQLGCRGPGLPLYTLHRSTDQKELRVLEDNSALDKMLQDVQMPSKKLDFIVLNETRFWYQMILPPHFDKSKKYPLLIDVYAGPCSQKADAAFRLNWATYLASTENIIVASFDGRGSGYQGDKIMHAINKRLGTLEVEDQIEAARQFLKMGFVDSKRVAIWGWSYGGYVTSMVLGSGSGVFKCGIAVAPVSRWEYYDSVYTERYMGLPTPEDNLDHYRNSTVMSRAENFKQVEYLLIHGTADDNVHFQQSAQISKALVDAGVDFQAMWYTDEDHGIASSTAHQHIYSHMSHFLQQCFSLR

SEQ ID NO: 1444 - protein, 532 aa, Homo sapiens
MVKRVAIVGAGVSGLASIKCCLEEGLEPTCFERSCDLGGLWRFTEHVEEGRASLYNSVVSNSSKEMSCYSDFPFPEDYPNFVPNSLFLEYLQLYATQFNLLRCIYFNTKVCSITKRPDFAVSGQWEVVTVCQGKQSSDTFAAVMVCTGFLTNPHLPLDSFPGIQTFKGQYFHSRQYKHPDVFKDKRVLVVGMGNSGTDIAVEASHLAKKVFLSTTGGAWVISRVFDSGYPWDMIFMTRFQNMLRNLLPTPVVSWLISKKMNSWFNHVNYGVAPEDRTQLREPVLNDELPGRIITGKVLIKPSIKEVKENSVVFNNTPKEEPIDVIVFATGYSFAFPFLDESIVKVEDGQASLYKYIFPAHLPKPTLAVIGLIKPLGSMIPTGETQARWVVQVLKGATTLPPPSVMMKEVNERKKNKHSGFGLCYCKALQSDYITYIDDLLTSINAKPDLRAMLLTDPRLALSIFFGPCTPYHFRLTGPGKWEGARKAILTQWDRTVNVTKTRTVQETPSTFETLLKLFSFLALLVAVFFIFL

SEQ ID NO: 1445 - protein, 236 aa, Homo sapiens [sequence omitted]

SEQ ID NO: 1446 - protein, 244 aa, Homo sapiens
MGLELYLDLLSQPSRAVYIFAKKNGIPFQLRTVDLLKGQHLSEQFSQVNCLKKVPVLKDGSFVLTESTAILIYLSSKYQVADHWYPADLQARAQVHEYLGWHADNIRGTFGVLLWTKVLGPLIGVQVPEEKVERNRNSMVLALQRLEDKFLRDRAFIAGQQVTLADLMSLEELIQPVALGCNLFEGRPQLTAWRERVEAFLGAELCQEAHNPIMSVLGQAAKKTLPVPPPEAHASMMLRIARIP

SEQ ID NO: 1447 - protein, 244 aa, Homo sapiens; identical to SEQ ID NO: 1446

SEQ ID NO: 1448 - protein, 164 aa, Homo sapiens
MKVASSSAAATAGPSCSLKAGRTAGEVVLGLSEQSVAISRCAGTRLPALLDEQQVNVLLYDMNGCYSRLKELVPTLPQNRKVSKVEILQHVIDYIRDLQLELNSESEVATAGGRGLPVRAPLSTLNGEISALAAEVRSESEYYIILLWETKATGGGCPPYFSGA

SEQ ID NO: 1449 - protein, 461 aa, Homo sapiens
MWQFRIFLLFASTWGISGVSAHPDPVFSSSEGAHQVLRVRRANSFLEEVRAGSLERECMEEICDFEEAQEIFQNVEDTLAFWIKYFDGDQCSTPPLDHQCDSPCCGHGTCIDGLGGFSCSCDKGWEGRFCQQEMGFQDCRVKNGGCYHYCLEETRGRRCRCAPGYELADDHMHCRPTVNFPCGKLWKRTDKKRKNFKRDIDPEDEELELGPRIVNGTLTKQGDSPWQAILLDSKKKLACGGVLIHTSWVLTAAHCLESSKKLTVRLGEYDLRRRDPWELDLDIKEVLVHPNYTRSNSDNDIALLRLSQPATLSKTIVPICLPNSGLAQELSQAGQETVVTGWGYQSDKVKDGRRNRTFILTFIRIPLAARNDCMQVMNNVVSENMLCAGIIGDTRDACDGDSGGPMVVFFRGTWFLVGLVSWGEGCGHLNNYGVYTKVGSYLKWIHSYIGERDVSLKSPKL

SEQ ID NO: 1450 - protein, 637 aa, Homo sapiens
MGLLSQGSPLSWEETQRHADHVRRHGILQFLHIYHAVKDRHKDVLKWGDEVEYMLVSFDHENRKVQLLLNGGDVLETLQEKGERTNPNHPTLWRPEYGSYMIEGTPGQPYGGTMSEFNTVEDNMRKRRKEATSVLGEHQALCTITSFPRLGCPGFTLPEHRPNPEEGGASKSLFFPDEAINKHPRFGTLTRNIRHRRGEKVVINVPIFKDKNTPSPFVETFPEDEEASKASKPDHIYMDAMGFGMGNCCLQVTFQACSISEARYLYDQLATICPIVMALSAASPFYRGYVSDIDCRWGVISASVDDRTREERGLEPLKNNRFKISKSRYDSIDSYLSKCGEKYNDIDLTIDTEIYEQLLEEGIDHLLAQHVAHLFIRDPLTLFEEKIHLDDANESDHFENIQSTNWQTMRFKPPPPNSDIGWRVEFRPMEVQLTDFENSAYVVFVVLLTRVILSYKLDFLIPLSKVDENMKVAQERDAVLQGMFYFRKDICKGGNAVVDGCSKAQTSSEPSAEEYTLMSIDTIINGKEGVFPGLIPILNSYLENMEVDVDTRCSILNYLKLIKKRASGELMTVARWMREFIANHPDYKQDSVITDEINYSLILKCNQIANELCECPELLGSGFRKAKYSGGKSDPSD

SEQ ID NO: 1451 - protein, 361 aa, Homo sapiens
MILADFGAEVVLVDRLGSVNHPSHLARGKRSLALDLKRSPGAAVLRRMCARADVLLEPFRCGVMEKLQLGPETLRQDNPKLIYARLSGFGQSGIFSKVAGHDINYVALSGVLSKIGRSGENPYPPLNLLADFGGGGLMCTLGILLALFERTRSGLGQVIDANMVEGTAYLSTFLWKTQAMGLWAQPRGQNLLDGGAPFYTTYKTADGEFMAVGAIEPQFYTLLLKGLGLESEELPSQMSIEDWPEMKKKFADVFARKTKAEWCQIFDGTDACVTPVLTLEEALHHQHNRERGSFITDEEQHACPRPAPQLSRTPAVPSAKRDPSVGEHTVEVLKDYGFSQEEIHQLHSDRIIESNKLKANL

SEQ ID NO: 1452 - protein, 296 aa, Homo sapiens
MVPVLLSLPLLLGPAVLQETGSYSLIFLYTGLSRPSKGLPRFQATAFLNDQAFFHYNSNSGKAEPVEPWSHVEGMEDWEKESQLQRAREEIFLVTLKDIMDYYEDSTGSHTFQGMFGCEITNNRSSGAVWRYAYDGEDFIEFNKEIPAWIPLDPAAANTKLKWEAEKVYVQRAKAYLEEECPTMLKKYLTYSRSHLDRTDPPTVKITSRVAPGRNRIFRCLAYDFYPQRISLHWNQASKKLASEPERGVFPNGNGTYLSWMEVEVPPQNRDPFVCHIEHKGLSQSLSVQWDEKSKV

SEQ ID NO: 1453 - protein, 1378 aa, Homo sapiens
MASGWDERPPWRLESLRLLPPPPLLLLLLLLRSSAQAAHIKKAEATTTTVGGSEAAEGQFDHYYHEAALGEALEAAAAAGPPGLARLFSIGNSVEGRPLWVLRLTAGLGPPPTPAAVGLDAAGPLLPGRPQVKLVGNMHGDETVSRQVLVYLARELASGYRRGDPRLVRLLNTTDVYLLPSLNPDGFERAREGDCGLGDSGPPGTSGRDNSRGRDLNRSFPDQFSTGEPPSLDEVPEVRALIDWIRRNKFVLSGNLHGGSVVASYPFDDSPEHKTTGIYSKTSDDEVFRYLAKAYASNHPIMRTGEPHCPGDEEETFKDGITNGAHWYDVEGGMQDYNYVWANCFEITLELSCCKYPPASQLRQEWENNRESLITLIEKVHIGIKGFVKDSVTGSGLENATISVAGINHNITTGRFGDFHRLLIPGSYNLTAVSPGYMPLTINNIVVKEGPATEIDFSLQPTVMSVVPDSTEAVTTPGTVAVPNIPPGTPSSHQPIQPKDFHHHHFPDMEIFLRRFANEYPNITRLYSLGKSVESRELYVMEISDNPGVHEPGEPEFKYIGNMHGNEVVGRELLLNLIEYLCKNFGTDPEVTDLVRSTRIHLMPSMNPDGYEKSQEGDSISVVGRNNSNNFDLNRNFPDQFVPITDPTQPETIAVMSWVKAYPFVLSANLHGGSLVVNYPYDDNEQGVATYSKSPDDAVFQQIALSYSKENSQMFQGRPCKDMYLNEYFPHGITNGASWYNVPGGMQDWNYLQTNCFEVTIELGCVKYPFEKELPKYWEQNRRSLIQFMKQVHQGVKGFVLDATDGRGILNATLSVAEINHPVTTYKAGDYWRLLVPGTYKITASARGYNPVTKNVTVRSEGAIQVNFTLVRSSTDANNESKKGKGHSTSTDDTSDPTSKEFEALIKHLSAENGLEGFMLSSSSDLALYRYHSYKDLSEFLRGLVMNYPHITNLTTLGQSVEYRHIWSLEISNKPNISEPEEPKIRFVAGIHGNAPVGTELLLALAEFLCLNYKKNPVVTQLVDRTRIVIVPSLNPDGRERAQEKDCTSKTGHTNARGRDLDTDFTSNASQPETKAIIENLIQKQDFSLSIALDGGSVLVTYPYDKPVQTVENKETLKHLASLYANNHPSMHMGQPSCPNNSDENIPGGVMRGAEWHSHLGSMKDYSVTYGHCPEITVYTSCCYFPSAAQLPALWAENKKSLLSMLVEVHKGVHGLVKDKTGKPISKAVIVLNEGIRVHTKEGGYFHVLLAPGVHNINAIADGYQQQHSQVFVHHDAASSVVIVFDTDNRIFGLPRELVVTVSGATMSALILTACIIWCICSIKSNRHKDGFHRLRQHHDEYEDEIRMMSTGSKKSLLSHEFQDETDTEEETLYSSKH

SEQ ID NO: 1454 - protein, 413 aa, Homo sapiens
MWLELVLASLLGFVIYWFVSRDKEETLPLGDGWWGPGSKPSAKEDESIRPFKVETSDEEIKDLHQRIDRFRASPPLEGSRFHYGFNSNYMKKVVSYWRNEFDWRKQVEILNQYPHFKTKIEGLDIHFIHVKPPQLPSGRTPKPLLMVHGWPGSFYEFYKIIPLLTDPKSHGLSDEHVFEVICPSIPGYGYSEASSKKGLNSVATARIFYKLMTRLGFQKFYIQGGDWGSLICTNMAQMVPNHVKGLHLNMAFISRSFYTMTPLLGQRFGRFLGYTEKDIELLYPYKEKVFYSIMRESGYLHIQATKPDTVGCALNDSPVGLAAYILEKFSTWTKSEYRELEDGGLERMKVFVPTGFSAFPSELLHAPEKWVKVKYPKLISYSYMERGGHFAAFEEPKLLAQDIRKFVSLAELQ

SEQ ID NO: 1455 - protein, 377 aa, Homo sapiens
MAATEGVGESAPGGEPGQPEQPPPPPPPPPAQQPQEEEMAAEAGEAAASPMDDGFLSLDSPTYVLYRDRAEWADIDPVPQNDGPSPVVQIIYSEKFRDVYDYFRAVLQRDERSERAFKLTRDAIELNAANYTVWHFRRVLLRSLQKDLQEEMNYIIAIIEEQPKNYQVWHHRRVLVEWLKDPSQELEFIADILNQDAKNYHAWQHRQWVIQEFRLWDNELQYVDQLLKEDVRNNSVWNQRHFVISNTTGYSDRAVLEREVQYTLEMIKLVPHNESAWNYLKGILQDRGLSRYPNLLNQLLDLQPSHSSPYLIAFLVDIYEDMLENQCDNKEDILNKALELCEILAKEKDTIRKEYWRYIGRSLQSKHSRESDIPASV

SEQ ID NO: 1456 - protein, 522 aa, Homo sapiens
MSEDKITGTLAFTVFTAVLGSFQFGYDIGVINAPQEVIISHYRHVLGVPLDDRRATINYDINGTDTPLIVTPAHTTPDAWEEETEGSAHIVTMLWSLSVSSFAVGGMVASFFGGWLGDKLGRIKAMLAANSLSLTGALLMGCSKFGPAHALIIAGRSVSGLYCGLISGLVPMYIGEIAPTTLRGALGTLHQLALVTGILISQIAGLSFILGNQDYWHILLGLSAVPALLQCLLLLFCPESPRYLYLNLEEEVRAKKSLKRLRGTEDITKDINEMRKEKEEASTEQKVSVIQLFTDPNYRQPIVVALMLHLAQQFSGINGIFYYSTSIFQTAGISQPVYATIGVGAINMIFTAVSVLLVEKAGRRTLFLAGMIGMFFCAVFMSLGLVLLDKFTWMSYVSMTAIFLFVSFFEIGPGPIPWFMVAEFFSQGPRPTALALAAFSNWVCNFIIALCFQYIADFLGPYVFFLFAGVVLVFTLFTFFKVPETKGKSFDEIAAEFRKKSGSAPPRKATVQMEFLGSSETV

SEQ ID NO: 1457 - protein, 352 aa, Homo sapiens
MKSLVLLLCFAQLWSCQSAPQGAGLGFRELACDDPETEHVALIAVHYLNKHLLQGFRQILNQIDKVKVWSRRPFGQVYELEIDTLETTCHALDPTPLANCSVRQQAEHAVEGDCDFHILKQDGQFRVLHAQCHSTPDSAEDVRKFCPRCPILIRFNDTNVVHTVKTALAAFNAQNNGTYFKLVEISRAQNVPFPVSTLVEFVIAATDCTGQEVTDPAKCNLLAEKQYGFCKATLIHRLGGEEVSVACKLFQTQPQPANANPAGPAPTVGQAAPVAPPAGPPESVVVGPVAVPLGLPDHRTHHDLRHAFSPVASVESASGEVLHSPKVGQPGDAGAAGPVAPLCPGRVRYFKI

SEQ ID NO: 1458 - protein, 277 aa, Homo sapiens
MDNNETSVDSKSINNFETKTIHGSKSMDSGIYLDSSYKMDYPEMGLCIIINNKNFHKSTGMSARNGTDVDAANLRETFMALKYEVRNKNDLTREEIMELMDSVSKEDHSKRSSFVCVILSHGDEGVIFGTNGPVDLKKLTSFFRGDYCRSLTGKPKLFIIQACRGTELDCGIETDSGTDDDMACQKIPVEADFLYAYSTAPGYYSWRNSRDGSWFIQSLCAMLKLYAHKLEFMHILTRVNRKVATEFESFSLDATFHAKKQIPCIVSMLTKELYFYH

SEQ ID NO: 1459 - protein, 294 aa, Homo sapiens
MIEVLTTDSQKLLHQLNTLLEQESRCQPKVCGLKLIESAHDNGLRMTARLRDFEVKDLLSLTQFFGFDTETFSLAVNLLDRFLSKMKVQAKHLGCVGLSCFYLAVKSIEEERNVPLATDLIRISQYRFTVSDLMRMEKIVLEKVCWKVKATTAFQFLQLYYSLIRETLPFERRNDLNFERLEAQLKACHCRIIFSKAKPSVLALAIIALEIQALKYVELTEGVECIQKHSKISGRDLTFWQELVSKCLTEYSSNKCSKPNGQKLKWIVSGRTARQLKHSYYRITHLPTIPETMG

SEQ ID NO: 1460 - protein, 658 aa, Homo sapiens
MMPRLLFRAWPRCPSLVLGAPSRPLSAVSGPDDYLQHSIVPTMHYQDSLPRLPIPKLEDTMKRYLNAQKPLLDDSQFRRTEALCKNFETGVGKELHAHLLAQDKQNKHTSYISGPWFDMYLTARDSIVLNFNPFMAFNPDPKSEYNDQLTRATNLTVSAVRFLKTLQAGLLEPEVFHLNPSKSDTDAFKRLIRFVPPSLSWYGAYLVNAYPLDMSQYFRLFNSTRIPRPNRDELFTDTKARHLLVLRKGHFYVFDVLDQDGNIVNPLEIQAHLKYILSDSSPVPEFPVAYLTSENRDVWAELRQKLIFDGNEETLKKVDSAVFCLCLDDFPMKDLIHLSHTMLHGDGTNRWFDKSFNLIVAEDGTAAVHFEHSWGDGVAVLRFFNEVFRDSTQTPAITPQSQPAATNSSASVETLSFNLSGALKAGITAAKEKFDTTVKTLSIDSIQFQRGGKEFLKKKQLSPDAVAQLAFQMAFLRQYGQTVATYESCSTAAFKHGRTETIRPASIFTKRCSEAFVRDPSKHSVGELQHMMAECSKYHGQLTKEAAMGQGFDRHLYALRYLATARGLNLPELYLDPAYQQMNHNILSTSTLNSPAVSLGGFAPVVPDGFGIAYAVHDDWIGCNVSSYSGRNAREFLHCVQKCLEDIFDALEGKAIKT

SEQ ID NO: 1461 - protein, 968 aa, Homo sapiens
MKYLVSVGAGPARRAGGLEDVSWGPRVSRRPQSYRAARHVNESLPRSAFRVPAAHGASVTPSAALGSGLPETQPEAVCRGTEKPRFAEGCKPAASRDKNVLAKALYDNVAESPDELSFRKGDIMTVLERDTQGLDGWWLCSLHGRQGIVPGNRLKILVGMYDKKPAAPGPGPPATPPQPQPSLPQGVHTPVPPASQYSPMLPTAYQPQPDNVYLVPTPSKTQQGLYQAPGPNPQFQSPPAKQTSTFSKQTPHHSFPSPATDLYQVPPGPGSPAQDIYQVPPSAGTGHDIYQVPPSLDTRSWEGTKPPAKVVVPTRVGQGYVYEASQAEQDEYDTPRHLLAPGSQDIYDVPPVRGLLPNQYGQEVYDTPPMAVKGPNGRDPLLDVYDVPPSVEKGLPPSNHHSVYDVPPSVSKDVPDGPLLREETYDVPPAFAKPKPFDPTRHPLILAAPPPDSPPAEDVYDVPPPAPDLYDVPPGLRRPGPGTLYDVPRERVLPPEVADGSVIDDGVYAVPPPAEREAPTDGKRLSASSTGSTRSSQSASSLEVVVPGREPLELEVAVETLARLQQGVSTTVAHLLDLVGSASGPGGWRSTSEPQEPPVQDLKAAVAAVHGAVHELLEFARSAVSSATHTSDRTLHAKLSRQLQKMEDVYQTLVVHGQVLDSGRGGPGFTLDDLDRLVACSRAVPEDAKQLASFLHGNASLLFRRTKAPGPGPEGSSSLHLNPTDKASSIQSRPLPSPPKFTSQDSPDGQYENSEGGWMEDYDYVHLQGKEEFEKTQKELLEKGNIVRQGKGQLELQQLKQFERLEQEVSRPIDHDLANWTPAQPLVPGRTGGLGPSDRQLLLFYLEQCEANLTTLTDAVDAFFTAVATNQPPKIFVAHSKFVILSAHKLVFIGDTLSRQAKAADVRSKVTHYSNLLCDLLRGIVATTKAAALQYPSPSAAQDMVDRVKELGHSTQQFRRVLGQLAAA

SEQ ID NO: 1462 - protein, 968 aa, Homo sapiens; identical to SEQ ID NO: 1461

SEQ ID NO: 1463 - protein, 503 aa, Homo sapiens
MMTISLIWGIAVLVSCCIWFIVGIRRRKAGEPPLENGLIPYLGCALKFGSNPLEFLRANQRKHGHVFTCKLMGKYVHFITNSLSYHKVLCHGKYFDWKKFHYTTSAKAFGHRSIDPNDGNTTENINNTFTKTLQGDALCSLSEAMMQNLQSVMRPPGLPKSKSNAWVTEGMYAFCYRVMFEAGYLTLFGRDISKTDTQKALILNNLDNFKQFDQVFPALVAGLPIHLFKTAHKAREKLAEGLKHKNLCVRDQVSELIRLRMFLNDTLSTFDDMEKAKTHLAILWASQANTIPATFWSLFQMIRSPEAMKAASEEVSGALQSAGQELSSGGSAIYLDQVQLNDLPVLDSIIKEALRLSSASLNIRTAKEDFTLHLEDGSYNIRKDDMIALYPQLMHLDPEIYPDPLTFKYDRYLDESGKAKTTFYSNGNKLKCFYMPFGSGATICPGRLFAVQEIKQFLILMLSCFELEFVESQVKCPPLDQSRAGLGILPPLHDIEFKYKLKH

SEQ ID NO: 1464 - protein, 545 aa, Homo sapiens
MASTRARPMLPLLLVLVAVVIPGPVGAQVSIHPTEAFLPRGGSVQVNCSSSCEDENLGLGLETNWMKDELSSGHNWKLFKLSDIGEDSRPLCFENCGTTQSSASATITVYSFPERVELDPLPAWQQVGKNLILRCLVEGGAPRTQLSVVLLRGNETLSRQAVDGDPKEITFTVLASRGDHGANFSCFTELDLRPQGLSLFKNVSEVRQLRTFDLPTRVLKLDTPDLLEVGTQQKFLCSLEGLFPASEAQIYLEMGGQMLTLESTNSRDFVSATASVEVTEKLDRTLQLRCVLELADQTLEMEKTLRIYNFSAPILTLSQPEVSEGDQVTVKCEAHGGAQVVLLNSTSPRPPTSQGTSPRPPTSQIQFTLNASPEDHKRRFFCSAALEVDGKSLFKNQTLELHVLYGPHLDKKDCLGNWTWQEGSQQTLTCQPQGNPAPNLTCSRKADGVPLPIGMVKSVKREMNGTYKCRAFSSRGSITRDVHLTVLYHDQNTWVIIVGVLVLIIAGFVIVASIYTYYRQRKIRIYKLQKAQEEALKLKVQAPPP

SEQ ID NO: 1465 - protein, 322 aa, Homo sapiens
MAFFSTQPPYMNPVIPFTGIIQGGLQNGLQITLQGTVHPFPNRIAVNFQTGFSGNDIAFHFNPRFEEGGYVVCNTKQNGKWGPEERKMQMPFQKGMPFELCFLVQRSEFKVMVNKNFFVQYSHRVPYHLVDTISVSGCLHLSFINFQTQGFQPAHQAPVAQTIIHTVHSIPGQMLSTPGIPPMAYPTPAYTIPFFTSIPNGFYPSKSINISGVVLPDAKRFHINLRCGGDIAFHLNPRFNEKVVVRNTQINNSWGPEERSLPGRMPFNRGQSFSVWILCEGHCFKVAVDGQHICEYYHRLKNLPDINTLEVAGDIQLTHVQT

SEQ ID NO: 1466 - protein, 322 aa, Homo sapiens; identical to SEQ ID NO: 1465

SEQ ID NO: 1467 - protein, 230 aa, Homo sapiens
MCGNNMSAPMPAVVPAARKATAAVIFLHGLGDTGHGWAEAFAGIKSSHIKYICPHAPVMPVTLNMSMMMPSWFDIIGLSPDSQEDESGIKQAAETVKALIDQEVKNGIPSNRIILGGFSQGGALSLYTALTTQQKLAGVTALSCWLPLRASFSQGPINSANRDISVLQCHGDCDPLVPLMFGSLTVERLKGLVNPANVTFKVYEGMMHSSCQQEMMDVKYFIDKLLPPID

SEQ ID NO: 1468 - protein, 245 aa, Homo sapiens
MDKNELVQKAKLAEQAERYDDMAACMKSVTEQGAELSNEERNLLSVAYKNVVGARRSSWRVVSSIEQKTEGAEKKQQMAREYREKIEMELRDICNDVLSLLEKFLIPNASQPESKVFYLKMKGDYYRYLAEVAAGDDKKGIVDQSQQAYQEAFEISKKEMQPTHPIRLGLALNFSVFYYEILNSPEKACSLAKTAFDEAIAELDTLSEESYKDSTLIMQLLRDNLTLWTSDTQGDEAEAGEGGEN

SEQ ID NO: 1469 - protein, 245 aa, Homo sapiens; identical to SEQ ID NO: 1468

SEQ ID NO: 1470 - protein, 313 aa, Homo sapiens
MRRAALWLWLCALALRLQPALPQIVTANVPPEDQDGSGDDSDNFSGSGTGALPDMTLSRQTPSTWKDVWLLTATPTAPEPTSRDTEATLTSILPAGEKPEEGEPVAHVEAEPDFTARDKEKEATTRPRETTQLPVTQQASTAARATTAQASVTSHPHGDVQPGLHETLAPTAPGQPDHQPPSVEDGGTSVIKEVVEDETTNQLPAGEGSGEQDFTFETSGENTAVAGVEPDLRNQSPVDEGATGASQGLLDRKEVLGGVIAGGLVGLIFAVCLVAFMLYRMKKKDEGSYSLEEPKQANGGAYQKPTKQEEFYA

SEQ ID NO: 1471 - protein, 143 aa, Homo sapiens
MKSQWCRPVAMDLGVYQLRHFSISFLSSLLGTENASVRLDNSSGASVVAIDNKIEQAMDLVKSHLMYAVREEVEVLKEQIKELIEKNSQLEQENNLLKTLASPEQLAQFQAQLQTGSPPATTQPQGTTQPPAQPASQGSGSTA

SEQ ID NO: 1472 - protein, 246 aa, Homo sapiens
MGDREQLLQRARLAEQAERYDDMASAMKAVTELNEPLSNEDRNLLSVAYKNVVGARRSSWRVISSIEQKTMADGNEKKLEKVKAYREKIEKELETVCNDVLALLDKFLIKNCNDFQYESKVFYLKMKGDYYRYLAEVASGEKKNSVVEASEAAYKEAFEISKEHMQPTHPIRLGLALNFSVFYYEIQNAPEQACLLAKQAFDDAIAELDTLNEDSYKDSTLIMQLLRDNLTLWTSDQQDEEAGEGN

SEQ ID NO: 1473 - protein, 524 aa, Homo sapiens
MILPFLVLAIGPCLTNSFVPEKEKDPSYWRQQAQETLKNALKLQKLNTNVAKNIIMFLGDGMGVSTVTAARILKGQLHHNTGEETRLEMDKFPFVALSKTYNTNAQVPDSAGTATAYLCGVKANEGTVGVSAATERTRCNTTQGNEVTSILRWAKDAGKSVGIVTTTRVNHATPSAAYAHSADRDWYSDNEMRPEALSQGCKDIAYQLMHNIKDIDVIMGGGRKYMYPKNRTDVEYELDEKARGTRLDGLDLISIWKSFKPRHKHSHYVWNRTELLALDPSRVDYLLGLFEPGDMQYELNRNNLTDPSLSEMVEVALRILTKNPKGFFLLVEGGRIDHGHHEGKAKQALHEAVEMDEAIGKAGTMTSQKDTLTVVTADHSHVFTFGGYTPRGNSIFGLAPMVSDTDKKPFTAILYGNGPGYKVVDGERENVSMVDYAHNNYQAQSAVPLRHETHGGEDVAVFAKGPMAHLLHGVHEQNYIPHVMAYASCIGANLDHCAWASSASSPSPGALLLPLALFPLRTLF

SEQ ID NO: 1474 - protein, 216 aa, Homo sapiens
MDDQRDLISNHEQLPILGQRARAPESNCNRGVLYTSVSVLVALLLAGQATTAYFLYQQQGRLDKLTVTSQNLQLENLRMKLPKSAKPVSPMRMATPLLMRPLSMDNMLQAPVKNVTKYGNMTQDHVMHLLTKSGPVNYPQLKGSFPENLKHLKNSMNGLDWKVFESWMKQWLLFEMSKNSLEEKQPTQTPPKEPLDMEDPSSGLGVTKQDMGQMFL

SEQ ID NO: 1475 - protein, 216 aa, Homo sapiens; identical to SEQ ID NO: 1474

SEQ ID NO: 1476 - protein, 432 aa, Homo sapiens
MAVSAFQLWRAGGLLRRNFLTHSSSWKIPPRVLKSSQPEALLSVTNNALCFAPLQTFTDEDIMMQKAVKKFAQEQIAPLVSTMDENSKMEKSVIQGLFQQGMMGIEVEAKYGGTEASFLCSVLVIEELAKVDASVALLCDIQNTVINKLFRKHGTEEQKATYLPKLVTEKLGSFCLSEAGAGSDSFALKTRADKSGNYYVINGSKMWISNAEHAELFLVFANVDPPSGYRGITCFLVDRDTEGFQIGRRENKMGIRASSTCQLTFENVKVPETSVLGKIGHGYKYAIGSLNEGRIGIAAQMLGLAQGCFDYTIPYIKERMQFGKRIFDFQGLQHQVAHVATQLEAARLLTYNAARLVEAGRPFIKEASMAKYYASEVAGLTTSKCIEWMGGVGYTKDYPVEKFFRDAKIGTIYEGTSNIQLNTIAKHIDAEY

SEQ ID NO: 1477 - protein, 120 aa, Homo sapiens
MAVTGDETDEETDLAPSHMAAATGDMPTYQIRAPTTALPQGVVMAASPGSLHSPQQLAEEATRKRELRLMKNREAAKECRRRKKEYVKCLESRVAVLEVQNKKLIEELETLKDICSPKTD

SEQ ID NO: 1478 - protein, 120 aa, Homo sapiens; identical to SEQ ID NO: 1477

SEQ ID NO: 1479 - protein, 150 aa, Homo sapiens
MTMETVESQQDRSVTHSVAEHSSLHMQTGQISVPTLAQDEETDLAPSHMAAATGDMPTYQIRAPTTALPQGVVMAASPGSLYSPQQLAEEATRKRELRLMKNREAARECRRKKKEYVKCLENRVAVLENQNKTLIEELKALKDLYCHKAE

SEQ ID NO: 1480 - protein, 461 aa, Homo sapiens
MGLPIVPGLLLSLVLLALLMGIHPSGVTGLVPSLGDREKRDNLCPQGKYAHPKNNSICCTKCHKGTYLVSDCPSPGQETVCEVCDKGTFTASQNHVRQCLSCKTCRKEMFQVEISPCKADMDTVCGCKKNQFQRYLSETHFQCVDCSPCFNGTVTIPCKEKQNTVCNCHAGFFLSGNECTPCSHCKKNQECMKLCLPPVANVTNPQDSGTAVLLPLVIFLGLCLLFFICISLLCRYPQWRPRVYSIICRDSAPVKEVEGEGIVTKPLTPASIPAFSPNPGFNPTLGFSTTPRFSHPVSSTPISPVFGPSNWHNFVPPVREVVPTQGADPLLYGSLNPVPIPAPVRKWEDVVAAQPQRLDTADPAMLYAVVDGVPPTRWKEFMRLLGLSEHEIERLELQNGRCLREAHYSMLEAWRRRTPRHEATLDVVGRVLCDMNLRGCLENIRETLESPAHSSTTHLPR

SEQ ID NO: 1481 - protein, 557 aa, Homo sapiens
MVSKLTSLQQELLSALLSSGVTKEVLIQALEELLPSPNFGVKLETLPLSPGSGADLDTKPVFHTLTNGHAKGRLSGDEGSEDGDDYDTPPILKELQALNTEEAAEQRAEVDRMLSEDPWRAAKMIKGYMQQHNIPQREVVDVTGLNQSHLSQHLNKGTPMKTQKRAALYTWYVRKQREILRQFNQTVQSSGNMTDKSSQDQLLFLFPEFSQQNQGPGQSEDACSEPTNKKMRRNRFKWGPASQQILYQAYDRQKNPSKEEREALVEECNRAECLQRGVSPSKAHGLGSNLVTEVRVYNWFANRRKEEAFRQKLAMDAYSSNQTHNLNPLLTHGSPHHQPSSSPPNKLSGVRYSQPGNNEVTSSSTISHHGNSAMVTSQSVLQQVSPASLDPGHSLLSPDSKMISVSGGGLPPVSTLTNIHSLSHHNPQQSQNLIMTPLSGVMAIAQSLNTSQAQGVPVINSVASSLAALQPVQFSQQLHSPHQQPLMQQSPGSHMAQQPFMAAVTQLQNSHMYAHKQEPPQYSHTSRFPSAMVVTDTSSINTLTSMSSSKQCPLQAW

SEQ ID NO: 1482 - protein, 319 aa, Homo sapiens
MALRGTVTDFSGFDGRADAEVLRKAMKGLGTDEDSILNLLTARSNAQRQQIAEEFKTLFGRDLVNDMKSELTGKFEKLIVALMKPSRLYDAYELKHALKGAGTDEKVLTEIIASRTPEELRAIKQAYEEEYGSNLEDDVVGDTSGYYQRMLVVLLQANRDPDTAIDDAQVELDAQALFQAGELKWGTDEEKFITILGTRSVSHLRRVFDKYMTISGFQIEETIDRETSGNLENLLLAVVKSIRSIPAYLAETLYYAMKGAGTDDHTLIRVIVSRSEIDLFNIRKEFRKNFATSLYSMIKGDTSGDYKKALLLLCGGEDD

SEQ ID NO: 1483 - protein, 887 aa, Homo sapiens
MLSRLFRMHGLFVASHPWEVIVGTVTLTICMMSMNMFTGNNKICGWNYECPKFEEDVLSSDIIILTITRCIAILYIYFQFQNLRQLGSKYILGIAGLFTIFSSFVFSTVVIHFLDKELTGLNEALPFFLLLIDLSRASALAKFALSSNSQDEVRENIARGMAILGPTFTLDALVECLVIGVGTMSGVRQLEIMCCFGCMSVLANYFVFMTFFPACVSLVLELSRESREGRPIWQLSHFARVLEEEENKPNPVTQRVKMIMSLGLVLVHAHSRWIADPSPQNSTAEQSKVSLGLAEDVSKRIEPSVSLWQFYLSKMISMDIEQVITLSLALLLAVKYIFFEQAETESTLSLKNPITSPVVTPKKAQDNCCRREPLLVRRNQKLSSVEEDPGVNQDRKVEVIKPLVAEAETSGRATFVLGASAASPPLALGAQEPGIELPSEPRPNEECLQILESAEKGAKFLSDAEIIQLVNAKHIPAYKLETLMETHERGVSIRRQLLSAKLAEPSSLQYLPYRDYNYSLVMGACCENVIGYMPIPVGVAGPLCLDGKEYQVPMATTEGCLVASTNRGCRAISLGGGASSRVLADGMSRGPVVRLPRACDSAEVKSWLETPEGFAVVKEAFDSTSRFARLQKLHVTLAGRNLYIRLQSKTGDAMGMNMISKGTEKALLKLQEFFPELQILAVSGNYCTDKKPAAINWIEGRGKTVVCEAVIPAKVVREVLKTTTEAMVDVNINKNLVGSAMAGSIGGYNAHAANIVTAIYIACGQDAAQNVGSSNCITLMEASGPTNEDLYISCTMPSIEIGTVGGGTNLLPQQACLQMLGVQGACKDNPGENARQLARIVCGTVMAGELSLMAALAAGHLVRSHMVHNRSKINLQDLQGTCTKKAA

SEQ ID NO: 1484 - protein, 334 aa, Homo sapiens
MTPLLLLAVLCLGTALATPKFDQTFNAQWHQWKSTHRRLYGTNEEEWRRAVWEKNMRMIQLHNGEYSNGKHGFTMEMNAFGDMTNEEFRQIVNGYRHQKHKKGRLFQEPLMLQIPKTVDWREKGCVTPVKNQGQCGSCWAFSASGCLEGQMFLKTGKLISLSEQNLVDCSHDQGNQGCNGGLMDFAFQYIKENGGLDSEESYPYEAKDGSCKYRAEYAVANDTGFVDIPQQEKALMKPVATVGPISVAMDASHPSLQFYSSGIYYEPNCSSKDLDHGVLVVGYGYEGTDSNKDKYWLVKNSWGKEWGMDGYIKIAKDRNNHCGLATAASYPIVN

SEQ ID NO: 1485 - protein, 1961 aa, Homo sapiens
MAQQAADKYLYVDKNFINNPLAQADCGAKKLVWVPSTKNGFEPASLKEEVGEEAIVELVENGKKVKVNKDDIQKMNPPKFSKVEDMAELTCLNEASVLHNLKERYYSGLIYTYSGLFCVVINPYKNLPIYSEEIVDMYKGKKRHEMPPHIYAITDTAYRSMMQDREDQSILCTGESGAGKTENTKKVIQYLAHVASSHKSKKDQGELERQLLQANPILEAFGNAKTVKNDNSSRFGKFIRINFDVNGYIVGANIETYLLEKSRAIRQAKEERTFHIFYYLLSGAGEHLKTDLLLEPYNKYRFLSNGHVTIPGQQDKDMFQETMEAMRIMGIPEDEQMGLLRVISGVLQLGNIVFKKERNTDQASMPDNTAAQKVSHLLGINVTDFTRGILTPRIKVGRDYVQKAQTKEQADFAIEALAKATYERMFRWLVLRINKALDKTKRQGASFIGILDIAGFEIFDLNSFEQLCINYTNEKLQQLFNHTMFILEQEEYQREGIEWNFIDFGLDLQPCIDLIEKPAGPPGILALLDEECWFPKATDKSFVEKVVQEQGTHPKFQKPKQLKDKADFCIIHYAGKVDYKADEWLMKNMDPLNDNIATLLHQSSDKFVSELWKDVDRIIGLDQVAGMSETALPGAFKTRKGMFRTVGQLYKEQLAKLMATLRNTNPNFVCCIIPNHEKKAGKLDPHLVLDQLRCNGVLEGIRICRQGFPNRVVFQEFRQRYEILTPNSIPKGFMDGKQACVLMIKALELDSNLYRIGQSKVFFRSGVLAHLEEERDLKITDVIIGFQACCRGYLARKAFAKRQQQLTAMKVLQRNCAAYLRLRNWQWWRLFTKVKPLLNSIRHEDELLAKEAELTKVREKHLAAENRLTEMETMQSQLMAEKLQLQEQLQAKTELCAEAEELRARLTAKKQELEEICHDLEARVEEEEERCQYLQAEKKKMQQNIQELEEQLEEEESARQKLQLEKVTTEAKLKKLEEDQIIMEDQNCKLAKEKKLLEDRVAEFTTDLMEEEEKSKSLAKLKNKHEAMITDLEERLRREEKQRQELEKTRRKLEGDSTDLSDQIAELQAQIAELKMQLAKKEEELQAALARVEEEAAQKNMALKKIRELETQISELQEDLESERACRNKAEKQKRDLGEELEALKTELEDTLDSTAAQQELRSKREQEVSILKKTLEDEAKTHEAQIQEMRQKHSQAVEELAEQLEQTKRVKATLEKAKQTLENERGELANEVKALLQGKGDSEHKRKKVEAQLQELQVKFSEGERVRTELADKVSKLQVELDSVTGLLNQSDSKSSKLTKDFSALESQLQDTQELLQEENRQKLSLSTKLKQMEDEKNSFREQLEEEEEEAKRNLEKQIATLHAQVTDMKKKMEDGVGCLETAEEAKRRLQKDLEGLSQRLEEKVAAYDKLEKTKTRLQQELDDLLVDLDHQRQSVSNLEKKQKKFDQLLAEEKTISAKYAEERDRAEAEAREKETKALSLARALEEAMEQKAELERLNKQFRTEMEDLMSSKDDVGKSVHELEKSNRALEQQVEEMKTQLEELEDELQATEDAKLRLEVNLQAMKAQFERDLQGRDEQSEEKKKQLVRQVREMEAELEDERKQRSIAMAARKKLEMDLKDLEAHIDTANKNREEAIKQLRKLQAQMKDCMRDVDDTRASREEILAQAKENEKKLKSMEAEMIQLQEELAAAERAKRQAQQERDELADEIANSSGKGALALEEKRRLEALIALLEEELEEEQGNTELINDRLKKANLQIDQINTDLNLERSHAQKNENARQQLERQNKELKAKLQEMESAVKSKYKASIAALEAKIAQLEEQLDNETKERQAASKQVRRAEKKLKDVLLQVEDERRNAEQFKDQADKASTRLKQLKRQLEEAEEEAQRANASRRKLQRELEDATETADAMNREVSSLKNKLRRGDMPFVVTRRIVRKGTGDCSDEEVDGKADGADAKATE

SEQ ID NO: 1486 - protein, 1829 aa, Homo sapiens
MSAGGRDEERRKLADIIHHWNANRLDLFEISQPTEDLEFHGVMRFYFQDKAAGNFATKCIRVSSTATTQDVIETLAEKFRPDMRMLSSPKYSLYEVHVSGERRLDIDEKPLVVQLNWNKDDREGRFVLKNENDAIPAKKAQSNGPEKQEKEGVIQNFKRTLSKKEKKEKKKREKEALRQASDKEERPSQGDDSENSRLAAEVYKDMPETSFTRTISNPEVVMKRRRQQKLEKRMQEFRSSDGRPDSGGTLRIYADSLKPNIPYKTILLSTTDPADFAVAESLEKYGLEKENPKDYCIARVMLPPGAQHSDERGAKEIILDDDECPLQIFREWPSDKGILVFQLKRRPPDYIPKKMKKHVEGKPLKGKDRADGSGYGSALPPEKLPYLVELSPGRRNHFAYYSYHTYEDGSDSRDKPKLYRLQLSVTEVGTEKFDDNSIQLFGPGIQPHHCDLTNMDGVVTVTPRSMDAETYVDGQRISETTMLQSGMRLQFGTSHVFKFVDPIQDHVLSKRSVDGGLMVKGPRHKPGAVQETTFELGGDIHSGTALPASRSTTRLDSDRVSSASSTAERGMVKPMIRLDQEQDYRRRESRTQDAAGPELMLPASIEFRESSEDSFLSAIINYTNSSTVHFKLSPTYVLYMACRYVLSSQHRPDISPTERTHKAIAVVNKMVSMMEGVIQEVDQVDQKQKNIAGALAFWMANASELLNFIKQDRDLSRITLDAQDVLAHLVQMAFKYLVHCLQSELNNYMPAFLDDPEENSLQRPKIDDVLHTLTGAMSLLRRCRVNAALTIQLFSQLFHFINMWLFNRLVTDPDSGLCSHYWGAIIRQQLGHIEAWAEKQGLELAADCHLSRIVQATTLLTMDKYVPDDIPNINSTCFKLNSLQLQALLQNYHCAPDEPFIPTDLIENVVAVAENTADELARSDGRDVQLEEDPDLQLPFLLPEDGYSCDVVRNIPNGLQEFLDPLCQRGFCRLVPHTRSPGTWTIYFEGADYESHLMRENTELTQPLRKEPEVITVTLKKQNGMGLSIVAAKGAGQDKLGIYVKSVVKGGAADVDGRLAAGDQLLSVDGRSLVGLSQERAAELMTRTSSVVTLEVAKQGAIYHGLATLLNQPSPMMQRISDRRGSGKPRPKSEGFELYNNSAQNGSPESPQMPWTEYSEPKKLPGDDRLMKNRADHRSSPNVANQPPSPGGKSPYTSGTAAKITSVSTGNLCTEEQTPPPRPEAYPIPTQTYTREYFTFPASKSQDRMAPVQNQWPNYEEKPHMHTESDHASIAIQRVTRSQEELREEKVYQLERHRVESGMDRKCDSDMWINQSSSVESSTSSQEHLNHSSKSVTPASTLTKSGPGRWKTPAAVLPTPVAVSQPIRTDLPPPPPPPPAHYTSDFDGISMDLPLPPPPANQAAPQSAQVAAAERKKREEHQRWYEKEKARLEEERERKRREQERKLGQMRTQSLNPASFSPLATQAKPEKPSTLQRPQETVIRELQPQQQPRTIERRDLQYITISKEELSSGDSLSPDPWKRDAREKLEKQQQMHIVDMLSKEIHELQNKGDRTAEESDRLRKLMLEWQFQKRLQESKQKDEDDDEEEDDDVDTMLIMQRLEAERRARLQDEERRRQQQLEEMRKREVEDRVRQEEDGRHQEEERVKRDAEEKRRQEEGYYSRLEAERRRQHEEAARRLLEPEEPGLSRPPLPQDYEPPSQSSAPSAPPPPPQRNASYLKTQVLSPDSLFTAKFVAYDDDDEEENYVPAGPNSYSGSAGTTAGTYDAPRDTREKLSRSQDADLPGSSGAPENLTFRERQRLFSQGQDVSDKVKASRKLTELENELNTK

SEQ ID NO: 1487 - protein, 1829 aa, Homo sapiens; identical to SEQ ID NO: 1486

SEQ ID NO: 1488 - protein, 421 aa, Homo sapiens
MAAALRRGYKVLRSVSHFECRAQHTKPSLKQEPGLGFSFELTEQQKEFQTIARKFAREEIIPVAPDYDKSGEYPFPLIKRAWELGLINTHIPESCGGLGLGTFDACLITEELAYGCTGVQTAIEANSLGQMPVIIAGNDQQKKKYLGRMTEQPMMCAYCVTEPSAGSDVAGIKTKAEKKGDEYVINGQKMWITNGGKANWYFVLTRSNPDPKVPASKAFTGFIVEADTPGIHIGKKELNMGQRCSDTRGITFEDVRVPKENVLIGEGAGFKIAMGAFDRTRPTVAAGAVGLAQRALDEATKYALDRKTFGKLLVEHQGVSFLLAEMAMKVELARLSYQRAAWEVDSGRRNTYFASIAKAFAGDIANQLATDAVQIFGGYGFNTEYPVEKLMRDAKIYQIYEGTAQIQRLIIAREHIEKYKN

SEQ ID NO: 1489 - protein, 735 aa, Homo sapiens
MNGDTRAAVVTSPPPTTAPHKERYFDRVDENNPEYLRERNMAPDLRQDFNMMEQKKRVSMILQSPAFCEELESMIQEQFKKGKNPTGLLALQQIADFMTASVPNVYPAAPQGGMAALNMSLGMVTPVNDLRGSDSIAYDKGEKLLRCKLAAFYRLADLFGWSQLIYNHITTRVNSEQEHFLIVPFGLLYSEVTASSLVKVNLQGDIVDRGSTNLGVNQAGFTLHSAIYAARPDAKCIVHIHTPAGAAVSAMKCGLLPISPEALSLGEVAYHDYHGILVDEEEKILIQKNLGPKSKVLILRNHGLVSVGESVEEAFFYIHNLVVACEIQVRTLASAGGPDNLVLLDPGKYKAKSRSPGTPAGEGSGSPPKWQIGEQEFEALMRMLDNLGYRTGYPYRYPALRERSKKYSDVEVPASVTGHSFASDGDSGTCSPLRHSFQKQQREKTRWLNSGRGDDASEEGQNGSSPKSKTKWTKEDGHRTSTSAVPNLFVPLNTNPKEVQEMRNKIREQNLQDIKTAGPQSQVLCGVMMDRSLVQGELVTASKAIIEKEYQPHVIVSTTGPNPFNTLTDRELEEYRREVERKQKGSEENLDETREQKEKSPPDQSAVPNTPPSTPVKLEGGLPQEPTSRDGSGCHASKPTPPDLSPDEPSEALAFPTVAEEAHASPDTTQPLAEADPEPASASAPGAEEVASPATEEGSPMDPGSDGSPGKSPSKKKKKFRTPSFLKKSKKKSDS

SEQ ID NO: 1490 - protein, 258 aa, Homo sapiens
MLCLVVCCLIWLISALDGSCSEPPPVNNSVFVGKETEEQILGIYLCIKGYHLVGKKSLVFDPSKEWNSTLPECLLGHCPDPVLENGKINSSGPVNISGKIMFECNDGYILKGSNWSQCLEDHTWAPPLPICRSRDCEPPETPVHGYFEGETFTSGSVVTYYCEDGYHLVGTQKVQCSDGEWSPSYPTCESIQEPPKSAEQSALEKAILAFQESKDLCNATENFVRQLREGGITMEELKCSLEMKKTKLKSDILLNYHS

SEQ ID NO: 1491 - protein, 222 aa, Homo sapiens
MSGKPVLHYFNARGRMECIRWLLAAAGVEFDEKFIQSPEDLEKLKKDGNLMFDQVPMVEIDGMKLAQTRAILNYIATKYDLYGKDMKERALIDMYTEGILDLTEMIMQLVICPPDQKEAKTALAKDRTKNRYLPAFEKVLKSHGQDYLVGNRLTRVDIHLLELLLYVEEFDASLLTSFPLLKAFKSRISSLPNVKKFLQPGSQRKLPVDAKQIEEARKIFKF

SEQ ID NO: 1492 - protein, 222 aa, Homo sapiens; identical to SEQ ID NO: 1491

SEQ ID NO: 1493 - protein, 218 aa, Homo sapiens
MPMILGYWNVRGLTHPIRLLLEYTDSSYEEKRYAMGDAPDYDRSQWLNEKFKLGLDFPNLPYLIDGSRKITQSNAIMRYLARKHHLCGETEEERIRADIVENQVMDNRMQLIMLCYNPDFEKQKPEFLKTIPEKMKLYSEFLGKRPWFAGDKVTYVDFLAYDILDQYHIFEPKCLDAFPNLKDFLARFEGLKKISAYMKSSRYLSTPIFSKLAQWSNK

SEQ ID NO: 1494 - protein, 218 aa, Homo sapiens; identical to SEQ ID NO: 1493

SEQ ID NO: 1495 - protein, 218 aa, Homo sapiens; identical to SEQ ID NO: 1493

SEQ ID NO: 1496 - protein, 721 aa, Homo sapiens
MTAKNSSKELPASESEVCIKTFKEQMRLELELPKLPGNRPTSPKISPRSSPRNSPCFFRKLLVNKSIRQRRRFTVAHTCFDVENGPSPGRSPLDPQASSSSGLVLHAAFPGHSQRRESFLYRSDSDYDLSPKAMSRNSSLPSEQHGDDLIVTPFAQVLASLRIVRNNFTLLTNLHGAPNKRSPAASQAPVTRVSLQEESYQKLAMETLEELDWCLDQLETIQTYRSVSEMASNKFKRMLNRELTHLSEMSRSGNQVSEYISNTFLDKQNDVEIPSPTQKDREKKKKQQLMTQISGVKKLMHSSSLNNTSISRFGVNTENEDHLAKELEDLNKWGLNIFNVAGYSHNRPLTCIMYAIFQERDLLKTFKISSDTFVTYMMTLEDHYHSDVAYHNSLHAADVAQSTHVLLSTPALDAVFTDLEILAAIFAAAIHDVDHPGVSNQFLINTNSELALMYNDESVLENHHLAVGFKLLQEEHCDIFQNLTKKQRQTLRKMVIDMVLATDMSKHMSLLADLKTMVETKKVTSSGVLLLDNYTDRIQVLRNMVHCADLSNPTKSLELYRQWTDRIMEEFFQQGDKERERGMEISPMCDKHTASVEKSQVGFIDYIVHPLWETWADLVQPDAQDILDTLEDNRNWYQSMIPQSPSPPLDERSRDCQGLMEKFQFELTLEEEDSEGPEKEGEGPNYFSSTKTLCVIDPENRDSLEETDIDIATEDKSLIDT

SEQ ID NO: 1497 - protein, 362 aa, Homo sapiens
MEVHNVSAPFNFSLPPGFGHRATDKALSIILVLMLLLIMLSLGCTMEFSKIKAHLWKPKGVIVALVAQFGIMPLAAFLLGKIFHLSNIEALAILICGCSPGGNLSNLFTLAMKGDMNLSIVMTTCSSFSALGMMPLLLYVYSKGIYDGDLKDKVPYKGIMISLVIVLIPCTIGIVLKSKRPHYVPYILKGGMIITFLLSVAVTALSVINVGNSIMFVMTPHLLATSSLMPFSGFLMGYILSALFQLNPSCRRTISMETGFQNIQLCSTILNVTFPPEVIGPLFFFPLLYMIFQLAEGLLIIIIFRCYEKIKPPKDQTKITYKAAATEDATPAALEKGTHNGNIPPLQPGPSPNGLNSGQMAN

SEQ ID NO: 1498 - protein, 357 aa, Homo sapiens
MAAPAKGENLSLVVHGPGDIRLENYPIPELGPNDVLLKMHSVGICGSDVHYWEHGRIGDFVVKKPMVLGHEAAGTVTKVGPMVKHLKPGDRVAIEPGVPREIDEFCKIGRYNLTPSIFFCATPPDDGNLCRFYKHSADFCYKLPDSVTFEEGALIEPLSVGIYACRRGSVSLGNKVLVCGAGPIGIVTLLVAKAMGASQVVVIDLSASRLAKAKEVGADFTIQVAKETPHDIAKKVESVLGSKPEVTIECTGAESSVQDGIYATHSGGTLVVVGMGPEMINLPLVHAAVREVDIKGVFRYCNTWPMAVSMLASKTLNVKPLVTHRFPLEKAVEAFETAKKGLGLKVMIKCDPNDQNP

SEQ ID NO: 1499 - protein, 398 aa, Homo sapiens
MQKDASSSGFLPSFQHFATQAIHVGPEPEQWSSRAVVLPISLATTFKQDSPGQSSGFVYSRSGNPTRNCLEKAVAALDGAKHCLTFARGLAATTTITHLLKAGDEVICMDEVYGGTNRYFRRVASEFGLKISFVDCSKTKLLEAAITPQTKLVWIETPTNPTLKLADIKACAQIVHKHKDIILVVDNTFMSAYFQRPLALGADICMCSATKYMNGHSDVVMGLVSVTSDDLNERLRFLQNSLGAVPSPFDCYLCCRGLKTLQIRMEKHFRNGMAVARFLESNPRVEKVIYPGLPSHPQHELAKRQCTGCPGMVSFYIKGTLQHAQVFLKNIKLFALAESLGGYESLAELPAIMTHASVPEKDRATLGISDTLIRLSVGLEDEKDLLEDLGQALKAAHP

SEQ ID NO: 1500 - protein, 398 aa, Homo sapiens; identical to SEQ ID NO: 1499

SEQ ID NO: 1501 - protein, 287 aa, Homo sapiens
MKKYLLPVLVLCLGYYYSTNEEFRPEMLQGKKVIVTGASKGIGREMAYHLSKMGAHVVLTARSEEGLQKVVSRCLELGAASAHYIAGTMEDMAFAERFVVEAGKLLGGLDMLILNHITQTTMSLFHDDIHSVRRSMEVNFLSYVVLSTAALPMLKQSNGSIAIISSMAGKMTQPLIASYSASKFALDGFFSTIRKEHLMTKVNVSITLCVLGFIDTETALKETSGIILSQAAPKQECALEIKGTVLRKDEVYYDKSSWTPLLLGNPGRRIMEFLSLRSYNRDLFVSN

SEQ ID NO: 1502 - protein, 293 aa, Homo sapiens
MVDSVYRTRSLGVAAEGIPDQYADGEAARVWQLYIGDTRSRTAEYKAWLLGLLRQHGCHRVLDVACGTGVDSIMLVEEGFSVTSVDASDKMLKYALKERWNRRKEPAFDKWVIEEANWLTLDKDVPAGDGFDAVICLGNSFAHLPDSKGDQSEHRLALKNIASMVRPGGLLVIDHRNYDYILSTGCAPPGKNIYYKSDLTKDITTSVLTVNNKAHMVTLDYTVQVPGAGRDGAPGFSKFRLSYYPHCLASFTELVQEAFGGRCQHSVLGDFKPYRPGQAYVPCYFIHVLKKTG

SEQ ID NO: 1503 - protein, 293 aa, Homo sapiens; identical to SEQ ID NO: 1502

SEQ ID NO: 1504 - protein, 293 aa, Homo sapiens; identical to SEQ ID NO: 1502

SEQ ID NO: 1505 - protein, 638 aa, Homo sapiens
MDLWRVFLTLALAVSSDMFPGSGATPATLGKASPVLQRINPSLRESSSGKPRFTKCRSPELETFSCYWTEGDDHNLKVPGSIQLYYARRIAHEWTPEWKECPDYVSAGANSCYFNSSYTSIWIPYCIKLTTNGDLLDEKCFTVDEIVQPDPPIGLNWTLLNISLPGIRGDIQVSWQPPPSADVLKGWIILEYEIQYKEVNETKWKTMSPIWSTSVPLYSLRLDKEHEVRVRSRQRSFEKYSEFSEVLRVTFPQMDTLAACEEDFRFPWFLIIIFGIFGVAVMLFVVIFSKQQRIKMLILPPVPVPKIKGIDPDLLKEGKLEEVNTILGIHDNYKPDFYNDDSWVEFIELDIDDADEKTEESDTDRLLSDDQEKSAGILGAKDDDSGRTSCYDPDILDTDFHTSDMCDGTSEFAQPQKLKAEADLLCLDQKNLKNSPYDASLGSLHPSITLTMEDKPQPLLGSETESTHQLPSTPMSSPVSLANIDFYAQVSDITPAGGVVLSPGQKIKAGLAQGNTQLEVAAPCQENYSMNSAYFCESDAKKCIAAAPHMEATTCVKPSFNQEDIYITTESLTTTARMSETADTAPDAEPVPDYTTVHTVKSPRGLILNATALPLPDKKKFLSSCGYVSTDQLNKIMQ

SEQ ID NO: 1506 - protein, 638 aa, Homo sapiens; identical to SEQ ID NO: 1505

SEQ ID NO: 1507 - protein, 700 aa, Homo sapiens [sequence omitted]

SEQ ID NO: 1508 - protein, 188 aa, Homo sapiens
MAAAPGARLLRAACASVAFRGLDCRRLLVCGTRAGPAVPQWTPSPHTLAEAGPGRPLSVSARARSSSEDKVTVHFKNRDGETLTTKGKVGDSLLDVVIENNLDIDGFGACEGTLACSTCHLIFEDHIYEKLDAITDEENDMLDLAFGLTNRSRLGCQVCLTKAMDNMTVRVPEAVADVRQSVDMSKNS

SEQ ID NO: 1509 - protein, 323 aa, Homo sapiens
MSSKPKPIEIIGAPFSKGQPRGGVEKGPAALRKAGLVEKLKETEYNVRDHGDLAFVDVPNDSPFQIVKNPRSVGKANEQLAAVVAETQKNGTISVVLGGDHSMAIGSISGHARVHPDLCVIWVDAHTDINTPLTTSSGNLHGQPVAFLLKELKGKFPDVPGFSWVTPCISAKDIVYIGLRDVDPGEHYIIKTLGIKYFSMTEVDKLGIGKVMEETFSYLLGRKKRPIHLSFDVDGLDPVFTPATGTPVVGGLSYREGLYITEEIYKTGLLSGLDIMEVNPTLGKTPEEVTRTVNTAVPLTLSCFGTKREGNHKPETDYLKPPK

SEQ ID NO: 1510 - protein, 573 aa, Homo sapiens
MWTFLGIATFTYFYKKCGDVTLANKELLLCVLVFLSLGLVLSYRCRHRNGGLLGRHQSGSQFAAFSDILSALPLIGFFWAKSPPESEKKEQLESKRRRKEVNLSETTLTGAATSVSTSSVTDPEVIIIGSGVLGSALATVLSRDGRTVTVIERDLKEPDRILGECLQPGGYRVLRELGLGDTVESLNAHHIHGYVIHDCESRSEVQIPYPVSENNQVQSGVAFHHGKFIMSLRKAAMAEPNVKFIEGVVLRLLEEDDAVIGVQYKDKETGDTKELHAPLTVVADGLFSKFRKNLISNKVSVSSHFVGFIMKDAPQFKANFAELVLVDPSPVLIYQISPSETRVLVDIRGELPRNLREYMTEQIYPQIPDHLKESFLEACQNARLRTMPASFLPPSSVNKRGVLLLGDAYNLRHPLTGGGMTVALKDIKIWRQLLKDIPDLYDDAAIFQAKKSFFWSRKRSHSFVVNVLAQALYELFSATDDSLRQLRKACFLYFKLGGECLTGPVGLLSILSPDPLLLIRHFFSVAVYATYFCFKSEPWATKPRALFSSGAILYKACSIIFPLIYSEMKYLVH

SEQ ID NO: 1511 - protein, 295 aa, Homo sapiens
MSGGLDVLQMKEEDVLKFLAAGTHLGGTNLDFQMEQYIYKRKSDGIYIINLKRTWEKLLLAARAIVAIENPADVSVISSRNTGQRAVLKFAAATGATPIAGRFTPGTFTNQIQAAFREPRLLVVTDPRADHQPLTEASYVNLPTIALCNTDSPLRYVDIAIPCNNKGAHSVGLMWWMLAREVLRMRGTISREHPWEVMPDLYFYRDPEEIEKEEQAAAEKAVTKEEFQGEWTAPAPEFTAAQPEVADWSEGVQVPSVPIQQFPTEDWSAQPATEDWSAAPTAQATEWVGATTEWS

SEQ ID NO: 1512 - protein, 295 aa, Homo sapiens; identical to SEQ ID NO: 1511

SEQ ID NO: 1513 - protein, 193 aa, Homo sapiens
MPNWGGGKKCGVCQKTVYFAEEVQCEGNSFHKSCFLCMVCKKNLDSTTVAVHGEEIYCKSCYGKKYGPKGYGYGQGAGTLSMDKGESLGIKHEEAPGHRPTTNPNASKFAQKIGGSERCPRCSQAVYAAEKVIGAGKSWHKSCFRCAKCGKGLESTTLADKDGEIYCKGCYAKNFGPKGFGFGQGAGALVHSE

SEQ ID NO: 1514 - protein, 135 aa, Homo sapiens
MGRVRTKTVKKAARVIIEKYYTRLGNDFHTNKRVCKEIAIIPSKNLRNKIAGYVTHLMKRIQRGPVRGISIKLQEEERERRDNYVPEVSALDQEIIEVDPDTKEMLKLLDFGSLSNLQVTQPTVGMNFKTPRGAV

SEQ ID NO: 1515 - protein, 264 aa, Homo sapiens
MAVGKNKRLTKGGKKGAKKKVVDPFSKKDWYDVKAPAMFNIRNIGKTLVTRTQGTKIASDGLKGRVFEVSLADLQNDEVAFRKFKLITEDVQGKNCLTNFHGMDLTRDKMCSMVKKWQTMIEAHVDVKTTDGYLLRLFCVGFTKKRNNQIRKTSYAQHQQVRQIRKKMMEIMTREVQTNDLKEVVNKLIPDSIGKDIEKACQSIYPLHDVFVRKVKMLKKPKFELGKLMELHGEGGSSGKTTGDETGAKVERADGYEPPVQESV

SEQ ID NO: 1516 - protein, 657 aa, Homo sapiens
MPRYTVHVRGEWLAVPCQDGKLSVGWLGREAVRRYMKNKPDNGGFTSVDEVRFLVRRCKGLGLLDNEDLLEVALEDNEFVEVVIEGDVMSPDFIPSQPEGVFLYSKYREPEKYIALDGDSLSTEDLVNLGKGHYKIKLTSIAEKKVQQSREVIDSIIKERTVVYGITTGFGKFARTVIPANKLQELQVNLVRSHSSGVGKPLSPERCRMLLALRINVLAKGYSGISLETLKQVIEVFNASCLSYVPEKGTVGASGDLAPLSHLALGLIGEGKMWSPKSGWADAKYVLEAHGLKPIVLKPKEGLALINGTQMITSLGCEAVERASAIARQADIVAALTLEVLKGTTKAFDTDIHAVRPHRGQIEVAFRFRSLLDSDHHPSEIAESHRFCDRVQDAYTLRCCPQVHGVVNDTIAFVKDIITTELNSATDNPMVFASRGETISGGNFHGEYPAKALDYLAIGVHELAAISERRIERLCNPSLSELPAFLVAEGGLNSGFMIAHCTAAALVSESKALCHPSSVDSLSTSAATEDHVSMGGWAARKALRVIEHVEQVLAIELLAACQGIEFLRPLKTTTPLEKVYDLVRSVVRPWIKDRFMAPDIEAAHRLLLDQKVWEVAAPYIEKYRMEHIPESRPLSPTAFSLESLRKNSATIPESDDL

SEQ ID NO: 1517 - protein, 149 aa, Homo sapiens
MASSDIQVKELEKRASGQAFELILSPRSKESVPEFPLSPPKKKDLSLEEIQKKLEAAEERRKSHEAEVLKQLAEKREHEKEVLQKAIEENNNFSKMAEEKLTHKMEANKENREAQMAAKLERLREKDKHVEEVRKNKESKDPADETEAD

SEQ ID NO: 1518 - protein, 228 aa, Homo sapiens
MDKLLLWMSVFTSLLSEAFAQTDLNQKVFVFPRESETDYVKLIPWLEKPLQNFTLCFRAYSDLSRSQSLFSYSVNSRDNELLIYKAKLEQYSLYIGNSKVTVRGLEEFPSPIHFCTSWESSSGIAEFWVNGKPWVKKGLQKGYTVKSSPSIVLGQEQDTYGGGFDKTQSFVGEIADLYMWDSVLTPENIHSVDRGFPPNPNILDWRALNYEINGYVVIKPRMWDNKSS

SEQ ID NO: 1519 - protein, 419 aa, Homo sapiens
MSFIPVAEDSDFPIQNLPYGVFSTQSNPKPRIGVAIGDQILDLSVIKHLFTGPVLSKHQHVFDETTLNSFMGLGQAAWKEARASLQNLLSASQAQLRDDKELRQRAFTSQASATMHLPATIGDYTDFYSSLQHATNVGIMFRGKENALLPNWLHLPVGYHGRASSVVVSGTPIRRPMGQMRPDNSKPPVYGASKRLDMELEMAFFVGPGNRFGEPIPISKAQEHIFGMVLMNDWSARDIQQWEYVPLGPFLGKSFGTTISPWVVPMDALMPFVVPNPKQDPKPLPYLCHSQPYTFDINLSVALKGEGMSQAATICRSNFKHMYWTILQQLTHHSVNGCNLRPGDLLASGTISGSDPESFGSMLELSWKGTKAIDVGQGQTRTFLLDGDEVIITGHCQGDGYRVGFGQCAGKVLPALSPA

SEQ ID NO: 1520 - protein, 432 aa, Homo sapiens
MADKLPYKVADIGLAAWGRKALDIAENEMPGLMRMREMYSASKPLKGARIAGCLHMTVETAVLIETLVALGAEVRWSSCNIFSTQDHAAAAIAKAGIPVFAWKGETDEEYLWCIEQTLHFKDGPLNMILDDGGDLTNLIHTKHPQLLSGIRGISEETTTGVHNLYKMMANGILKVPAINVNDSVTKSKFDNLYGCRESLIDGIKRATDVMIAGKVAVVAGYGDVGKGCAQALRGFGARVIITEIDPINALQAAMEGYEVTTMDEACKEGNIFVTTTGCVDIILGRHFEQMKDDAIVCNIGHFDVEIDVKWLNENAVEKVNIKPQVDRYLLKNGHRIILLAEGRLVNLGCAMGHPSFVMSNSFTNQVMAQIELWTHPDKYPVGVHFLPKKLDEAVAEAHLGKLNVKLTKLTEKQAQYLGMPINGPFKPDHYRY

SEQ ID NO: 1521 - protein, 187 aa, Homo sapiens
MAADISQWAGPLSLQEVDEPPQHALRVDYGGVTVDELGKVLTPTQVMNRPSSISWDGLDPGKLYTLVLTDPDAPSRKDPKFREWHHFLVVNMKGNDISSGTVLSEYVGSGPPKDTGLHRYVWLVYEQEQPLNCDEPILSNKSGDNRGKFKVESFRKKYHLGAPVAGTCFQAEWDDSVPKLHDQLAGK

SEQ ID NO: 1522 - protein, 187 aa, Homo sapiens; identical to SEQ ID NO: 1521

SEQ ID NO: 1523 - protein, 858 aa, Homo sapiens
MVNFTVDQIRAIMDKKANIRNMSVIAHVDHGKSTLTDSLVCKAGIIASARAGETRFTDTRKDEQERCITIKSTAISLFYELSENDLNFIKQSKDGSGFLINLIDSPGHVDFSSEVTAALRVTDGALVVVDCVSGVCVQTETVLRQAIAERIKPVLMMNKMDRALLELQLEPEELYQTFQRIVENVNVIISTYGEGESGPMGNIMIDPVLGTVGFGSGLHGWAFTLKQFAEMYVAKFAAKGEGQLGAAERAKKVEDMMKKLWGDRYFDPANGKFSKSANSPDGKKLPRTFCQLILDPIFKVFDAIMNFRKEETAKLIEKLDIKLDSEDKDKEGKPLLKAVMRRWLPAGDALLQMITIHLPSPVTAQKYRCELLYEGPPDDEAAMGIKSCDPKGPLMMYISKMVPTSDKGRFYAFGRVFSGVVSTGLKVRIMGPNYTPGKKEDLYLKPIQRTILMMGRYVEPIEDVPCGNIVGLVGVDQFLVKTGTITTFEHAHNMRVMKFSVSPVVRVAVEAKNPADLPKLVEGLKRLAKSDPMVQCIIEESGEHIIAGAGELHLEICLKDLEEDHACIPIKKSDPVVSYRETVSEESNVLCLSKSPNKHNRLYMKARPFPDGLAEDIDKGEVSARQELKARARYLAEKYEWDVAEARKIWCFGPDGTGPNILTDITKGVQYLNEIKDSVVAGFQWATKEGALCEENMRGVRFDVHDVTLHADAIHRGGGQIIPTARRCLYASVLTAQPRLMEPIYLVEIQCPEQVVGGIYGVLNRKRGHVFEESQVAGTPMFVVKAYLPVNESFGFTADLRSNTGGQAFPQCVFDHWQILPGDPFDNSSRPSQVVAETRKRKGLKEGIPALDNFLDKL

SEQ ID NO: 1524 - protein, 158 aa, Homo sapiens
MSHGKRTDMLPEIAAAVGFLTSLLRTRGCVSEQRLKVFSRALQDALTDHYKHHWFPEKPSKGSGYRCIRINHKMDPIISKVASQIGLSQPQLHQLLPSELTLWVDPYEVSYRIGEDGSICVLYEEAPVATSYGLLTCKNQMMLGRSSPSKNYVMTVSS

SEQ ID NO: 1525 - protein, 377 aa, Homo sapiens
MGTQGKVITCKAAIAWKTDSPLCIEEIEVSPPKAHEVRIKVIATCVCPTDINATNPKKKALFPVVLGHECAGIVESVGPGVTNFKPGDKVIPFFAPQCKKCKLCLSPLTNLCGKLRNFKYPTIDQELMEDRTSRFTSKERSIYHFMGVSSFSQYTVVSEANLARVDDEANLERVCLIGCGFTSGYGAAINTAKVTPGSACAVFGLGCVGLSAVIGCKIAGASRIIAIDINSEKFPKAKALGATDCLNPRDLDKPVQDVITELTGGGVDFSLDCAGTAQTLKAAVDCTVVGWGSCTVVGAKVDEMNISTVDMILGRSVKGTFFGGWKSVDSVPNLVTDYKNKKFDLDLLVTHALPFDKINDAIDLMNQGKSIRTILTF

SEQ ID NO: 1526 - protein, 332 aa, Homo sapiens
MGGEQEEERFDGMLLAMAQQHEGGVQELVNTFFSFLRRKTDFFIGGEEGMAEKLITQTFNHHNQLAQKARREKRARQETERREKAERAARLAKEAKAETPGPQIKELTDEEAERLQLEIDQKKDAENHEVQLKNGSLDSPGKQDAEEEEDEEDEKDKGKLKPNLGNGADLPNYRWTQTLSELDLAVPFRVSFRLKGKDVVVDIQRRHLRVGLKGQAPVIDGELYNEVKVEESSWLIEDGKVVTVHLEKINKMEWWNRLVTSDPEINTKKINPENSKLSDLDSETRSMVEKMMYDQRQKSMGLPTSDEQKKQEILKKFMDQHPEMDFSKAKFN

SEQ ID NO: 1527 - protein, 501 aa, Homo sapiens
MSSPAQPAVPAPLANLKIQHTKIFINNEWHNSLNGKKFPVINPATEEVICHVEEGDKADVDKAVKAARQAFQIGSPWRTMDASERGCLLNKLADLMERDRVLLATMESMNAGKIFTHAYLLDTEVSIKALKYFAGWADKIHGQTIPSDGDVFTYTRREPIGVCGQIIPWNGPLILFIWKIGAALSCGNTVIVKPAEQTPLTALYMASLIKEAGFPPGVVNVVPGYGSTAGAAISSHMDIDKVSFTGSTEVGKLIKEAAGKSNLKRVTLELGGKSPCIVFADADLDSAVEFAHQGVFFHQGQICVAASRLFVEESIYDEFVRRSVERAKKYVLGNPLDSGISQGPQIDKEQHAKILDLIESGKKEGAKLECGGGRWGNKGFFVQPTVFSNVTDEMRIAKEEIFGPVQQIMKFKSIDEVIKRANNTPYGLAAGVFTKDLDRAITVSSALQAGTVWVNCYLTLSVQCPFGGFKMSGNGREMGEQGVYEYTELKTVAMKISQKNS

SEQ ID NO: 1528 - protein, 234 aa, Homo sapiens
MAERGYSFSLTTFSPSGKLVQIEYALAAVAGGAPSVGIKAANGVVLATEKKQKSILYDERSVHKVEPITKHIGLVYSGMGPDYRVLVHRARKLAQQYYLVYQEPIPTAQLVQRVASVMQEYTQSGGVRPFGVSLLICGWNEGRPYLFQSDPSGAYFAWKATAMGKNYVNGKTFLEKRYNEDLELEDAIHTAILTLKESFEGQMTEDNIEVGICNEAGFRRLTPTEVRDYLAAIA

SEQ ID NO: 1529 - protein, 234 aa, Homo sapiens; identical to SEQ ID NO: 1528

SEQ ID NO: 1530 - protein, 255 aa, Homo sapiens
MSSIGTGYDLSASTFSPDGRVFQVEYAMKAVENSSTAIGIRCKDGVVFGVEKLVLSKLYEEGSNKRLFNVDRHVGMAVAGLLADARSLADIAREEASNFRSNFGYNIPLKHLADRVAMYVHAYTLYSAVRPFGCSFMLGSYSVNDGAQLYMIDPSGVSYGYWGCAIGKARQAAKTEIEKLQMKEMTCRDVVKEVAKIIYIVHDEVKDKAFELELSWVGELTKGRHEIVPKDVREEAEKYAKESLKEEDESDDDNM

SEQ ID NO: 1531 - protein, 261 aa, Homo sapiens
MSRRYDSRTTIFSPEGRLYQVEYAMEAIGHAGTCLGILANDGVLLAAERRNIHKLLDEVFFSEKIYKLNEDMACSVAGITSDANVLTNELRLIAQRYLLQYQEPIPCEQLVTALCDIKQAYTQFGGKRPFGVSLLYIGWDKHYGFQLYQSDPSGNYGGWKATCIGNNSAAAVSMLKQDYKEGEMTLKSALALAVKVLNKTMDVSKLSAEKVEIATLTRENGKTVIRVLKQKEVEQLIKKHEEEEAKAEREKKEKEQREKDK

SEQ ID NO: 1532 - protein, 241 aa, Homo sapiens
MFLTRSEYDRGVNTFSPEGRLFQVEYAIEGHKLGSTAIGIQTSEGVCLAVEKRITSPLMEPSSIEKIVEIDAHIGCAMSGLIADAKTLIDKARVETQNHWFTYNETMTVESVTQAVSNLALQFGEEDADPGAMSRPFGVALLFGGVDEKGPQLFHMDPSGTFVQCDARAIGSASEGAQSSLQEVYHKSTTLKEAIKSSLIILKQVMEEKLNATNIELATVQPGQNFHMFTKEELEEVIKDI

SEQ ID NO: 1533 - protein, 241 aa, Homo sapiens; identical to SEQ ID NO: 1532

SEQ ID NO: 1534 - protein, 1043 aa, Homo sapiens
MENAHTKTVEEVLGHFGVNESTGLSLEQVKKLKERWGSNELPAEEGKTLLELVIEQFEDLLVRILLLAACISFVLAWFEEGEETITAFVEPFVILLILVANAIVGVWQERNAENAIEALKEYEPEMGKVYRQDRKSVQRIKAKDIVPGDIVEIAVGDKVPADIRLTSIKSTTLRVDQSILTGESVSVIKHTDPVPDPRAVNQDKKNMLFSGTNIAAGKAMGVVVATGVNTEIGKIRDEMVATEQERTPLQQKLDEFGEQLSKVISLICIAVWIINIGHFNDPVHGGSWIRGAIYYFKIAVALAVAAIPEGLPAVITTCLALGTRRMAKKNAIVRSLPSVETLGCTSVICSDKTGTLTTNQMSVCRMFILDKVEGDTCSLNEFTITGSTYAPIGEVQKDDKPVKCHQYDGLVELATICALCNDSALDYNEAKGVYEKVGEATETALTCLVEKMNVFDTELKGLSKIERANACNSVIKQLMKKEFTLEFSRDRKSMSVYCTPNKPSRTSMSKMFVKGAPEGVIDRCTHIRVGSTKVPMTPGVKQKIMSVIREWGSGSDTLRCLALATHDNPLRREEMHLEDSANFIKYETNLTFVGCVGMLDPPRIEVASSVKLCRQAGIRVIMITGDNKGTAVAICRRIGIFGQDEDVTSKAFTGREFDELSPSAQRDACLNARCFARVEPSHKSKIVEFLQSFDEITAMTGDGVNDAPALKKSEIGIAMGSGTAVAKTASEMVLADDNFSTIVAAVEEGRAIYNNMKQFIRYLISSNVGEVVCIFLTAALGFPEALIPVQLLWVNLVTDGLPATALGFNPPDLDIMNKPPRNPKEPLISGWLFFRYLAIGCYVGAATVGAAAWWFIAADGGPRVSFYQLSHFLQCKEDNPDFEGVDCAIFESPYPMTMALSVLVTIEMCNALNSLSENQSLLRMPPWENIWLVGSICLSMSLHFLILYVEPLPLIFQITPLNLTQWLMVLKISLPVILMDETLKFVARNYLEPGKECAQPATKPSCSLSACTDGISWPFVLLIMPLVVWVYSTDTNFSDMFWS

SEQ ID NO: 1535 - protein, 289 aa, Homo sapiens
MALAAARRVLLQAGSRLGRRGAVDGARRFSNKRVLVEKEGEAGIAVMKFKNPPVNSLSLEFLTEFVISLEKLENDKSIRGVILTSERPGIFSAGLDLMEMYGRNPAHYAEYWKAVQELWLRLYLSNLTLISAINGASPAGGCLMALTCDYRIMADNSKYTIGLNESLLGIVAPFWLKDNYVNTIGHRAAERALQLGTLFPPAEALKVGLVDEVVPEDQVHSKARSVMAKWFTIPDHSRQLTKSMMRKATADNLIKQREADIQNFTSFISRDSIQKSLHVYLEKLKQKKG

SEQ ID NO: 1536 - protein, 289 aa, Homo sapiens; identical to SEQ ID NO: 1535

SEQ ID NO: 1537 - protein, 661 aa, Homo sapiens
MNPDLRKERASATFNPELITHILDGSPENTRRRREIENLILNDPDFQHEDYNFLTRSQRYEVAVKKSATMVKKMREYGISDPEEIMWFKKLYLANFVEPVGLNYSMFIPTLLNQGTTAQQEKWMRPSQELQIIGTYAQTEMGHGTHLRGLETTATYDPKTQEFILNSPTVTSIKWWPGGLGKTSNHAIVLAQLITQGECYGLHAFVVPIREIGTHKPLPGITVGDIGPKFGYEEMDNGYLKMDNYRIPRENMLMKYAQVKPDGTYVKPLSNKLTYGTMVFVRSFLVGNAAQSLSKACTIAIRYSAVRRQSEIKQSEPEPQILDFQTQQYKLFPLLATAYAFHFVGRYMKETYLRINESIGQGDLSELPELHALTAGLKAFTTWTANAGIEECRMACGGHGYSHSSGIPNIYVTFTPACTFEGENTVMMLQTARFLMKIYDQVRSGKLVGGMVSYLNDLPSQRIQPQQVAVWPTMVDINSLEGLTEAYKLRAARLVEIAAKNLQTHVSHRKSKEVAWNLTSVDLVRASEAHCHYVVVKVFSDKLPKIQDKAVQAVLRNLCLLYSLYGISQKGGDFLEGSIITGAQLSQVNARILELLTLIRPNAVALVDAFDFKDMTLGSVLGRYDGNVYENLFEWAKKSPLNKTEVHESYHKHLKPLQSKL

SEQ ID NO: 1538 - protein, 661 aa, Homo sapiens; identical to SEQ ID NO: 1537

SEQ ID NO: 1539 - protein, 887 aa, Homo sapiens
MVTLWWPCLVLALLSGLETSGFPRSPLRLLGKRSLPEGVVDGIEIYSTKISCKVTSRFAHNVVTTRAVNRADKAKEVSFDVELPKTAFITNFTLTIDGVTYPGSVKEKEVAQKQYEKAVSQGKTAGLVKASGRKLEKFTVSVNVAAGSKVIFELTYEELLKRNKGKYEMYLKVQPKQLVRHFEIDAHIFEPQGISMLDADASFITNDLLGSALTKSFSGKKGHVSFKPSLDQQRSCPTCTDSLLNGDFTIVYDVNRESPGNVQIVNGYFVHFFAPQGLPVVPKNIAFVIDVSGSMSGRKIQQTREALLKILDDMKEEDYLNFILFSTGVTTWKDHLVKATPANLEEARAFVKNIRDRSMTNINDGLLRGIEMLNKAREDHLVPERSTSILVMLTDGDANTGESRPEKIQENVRNAIRGKFPLYNLGFGNNLNYNFLESLALENHGFARRIYEDSDASLQLQGFYEEVANPLLTNVELEYPENAILDLTRNSYPHFYDGSEIVVAGRLVDRNVDNFKADVKGHGALNDLTFTEEVDMKEMDAALKEQGYIFGDYIERLWAYLTIEQLLEKRKNARGDEKENITAEALELSLKYHFVTPLTSMVVTKPEDNEDQTAIADKPGEEAISASTAYLTSQQSSHSPYYYVDGDPHFIIQVPGKNDTICFNIDEKPGTVLSLIQDPVTGIAVTGQIIGEKGNNASSRTGKTYFGKLGIANAWMDFRIEVTTEKIILGNGDALSTFSWLDTVTVTQTGLSVTINRKKNMVVSFEDGISFVIVLHQVWKKHPVHQDFLGFYVVDSHRMSAQTHGLLGQFFQPFDFKVFDVRPGSDPMKPDATMVVKSHRLTVTRGSQKDYRKDASVGTKVVCWFVHNNGEGFIDGVHTDYIVPSLF

SEQ ID NO: 1540 - protein, 862 aa, Homo sapiens
MAQPGPAPQPDVSLQQRVAELEKINAEFLRAQQQLEQEFNQKRAKFKELYLAKEEDLKRQNAVLQAAQDDLGHLRTQLWEAQAEMENIKAIATVSENTKQEAIDEVKRQWREEVASLQAVMKETVRDYEHQFHLRLEQERAQWAQYRESADREIADLRRRLSEGQEEENLENEMKKAQEDAEKLRSVVMPMEKEIAALKDKLTEAEDKIKELEASKVKELNHYLEAEKSCRTDLEMYVAVLNTQKSVLQEDAEKLRKELHEVCHLLEQERQQHNQLKHTWQKANDQFLESQRLLMRDMQRMEIVLTSEQLRQVEELKKKDQEEDEQQRINKGKDNKKIDTEEEVKIPVVCALTQEESSTPLSNEEEHLDSTHGSVHSLDADLLLPSGDPFSKSDNDMFKEGLRRAQSTDSLGTSSSLQSKALGYNYKAKSAGNLDESDFGPLVGADSVSENFDTVSLGSLQMPSGFMLTKDQERAIKAMTPEQEETASLLSSVTQGMESAYVSPSGYRLVSETEWNLLQKEVHNAGNKLGRRCDMCSNYEKQLQGIQIQEAETRDQVKKLQLMLRQANDQLEKTMKEKQELEDFLRQSAEDSSHQISALVLRAQASEVLLEELQQSFSQAKRDVQEQMAVLMQSREQVSEELVRLQKDNDSLQGKHSLHVSLQLAEDFILPDTVQVLRELVLKYRENIVHVRTAADHMEEKLKAEILFLKEQIQAEQCLKENLEETLQLEIENCKEEIASISSLKAELERIKVEKGQLESTLREKSQQLESLQEIKVNLEEQLKKETAAKATVEQLMFEEKNKAQRLQTELDVSEQVQRDFVKLSQTLQVQLERIRQADSLERIRAILNDTKLTDINQLPET

SEQ ID NO: 1541 - protein, 1863 aa, Homo sapiens
MAPTWRPSVVSVVGPVGLFLVLLARGCLAEEPPRFIREPKDQIGVSGGVASFVCQATGDPKPRVTWNKKGKKVNSQRFETIDFDESSGAVLRIQPLRTPRDENVYECVAQNSVGEITVHAKLTVLREDQLPPGFPNIDMGPQLKVVERTRTATMLCAASGNPDPEITWFKDFLPVDPSASNGRIKQLRSGALQIESSEETDQGKYECVATNSAGVRYSSPANLYVRVRRVAPRFSILPMSHEIMPGGNVNITCVAVGSPMPYVKWMQGAEDLTPEDDMPVGRNVLELTDVKDSANYTCVAMSSLGVIEAVAQITVKSLPKAPGTPVVTENTATSITVTWDSGNPDPVSYYVIEYKSKSQDGPYQIKEDITTTRYSIGGLSPNSEYEIWVSAVNSIGQGPPSESVVTRTGEQAPASAPRNVQARMLSATTMIVQWEEPVEPNGLIRGYRVYYTMEPEHPVGNWQKHNVDDSLLTTVGSLLEDETYTVRVLAFTSVGDGPLSDPIQVKTQQGVPGQPMNLRAEAKSETSIGLSWSAPRQESVIKYELLFREGDRGREVGRTFDPTTAFVVEDLKPNTEYAFRLAARSPQGLGAFTAVVCQRTLQAKPSAPPQDVKCTSLRSTAILILLEALEKWTEYRVTAVAYTEVGPGPESSPVVVRTDEDVPSAPPRKVEAEALNATAIRVLWRSPTPGRQHGQIRGYQVHYVRMEGTEARGPPRIKDIMLADAQEMVITNLQPETAYSITVAAYTMKGDGARSKPKVVVTKGAVLGRPTLSVQQTPEGSLLARWEPPADAAEDPVLGYRLQFGREDAAPATLELAAWERRFAAPAHKGATYVFRLAARGRAGLGEEASAALSIPEDAPRGFPQILGPAGNVSAGSVILRWLPPVPAEGNGAIIKYTVSVREAGTPGPATETELAAAAQPGAETALTLQGLRPETAYELRVRAHTRRGPGPFSPPLRYRLARDPVSPKNFKVKMIMKTSVLLSWEFPDNYNSPTPYKIQYNGLTLDVDGRTTKKLITHLKPHTFYNFVLTNRGSSLGGLQQTVTARTAFNMLSGKPSVAPKPDNDGSIVVYLPDGQSPVTVQNYFIVMVPLRKSRGGQFPILLGSPEDMDLEELIQDLSRLQRRSLRHSRQLEVPRPYIAARFSILPAVFHPGNQKQYGGFDNRGLEPGHRYVLFVLAVLQKNEPTFAASPFSDPFQLDNPDPQPIVDGEEGLIWVIGPVLAVVFIICIVIAILLYKNKPDSKRKDSEPRTKCLLNNADLAPHHPKDPVEMRRINFQTPGMLSHPPIPITDMAEHMERLKANDSLKLSQEYESIDPGQQFTWEHSNLEANKPKNRYANVIAYDHSRVILQPLEGIMGSDYINANYVDGYRRQNAYIATQGPLPETFGDFWRMVWEQRSATVVMMTRLEEKSRVKCDQYWPNRGTETYGFIQVTLLDTMELATFCVRTFSLHKNGSSEKREVRHFQFTAWPDHGVPEYPTPFLAFLRRVKTCNPPDAGPVVVHCSAGVGRTGCFIVIDAMLERIRTEKTVDVYGHVTLMRSQRNYMVQTEDQYSFIHEALLEAVGCGNTEVPARSLYTYIQKLAQVEPGEHVTGMELEFKRLASSKAHTSRFITASLPCNKFKNRLVNILPYESSRVCLQPIRGVEGSDYINASFIDGYRQQKAYIATQGPLAETTEDFWRALWENNSTIVVMLTKLREMGREKCHQYWPAERSARYQYFVVDPMAEYNMPQYILREFKVTDARDGQSRTVRQFQFTDWPEQGAPKSGEGFIDFIGQVHKTKEQFGQDGPISVHCSAGVGRTGVFITLSIVLERMRYEGVVDIFQTVKVLRTQRPAMVQTEDEYQFCFQAALEYLGSFDHYAT

SEQ ID NO: 1542 - protein, 1863 aa, Homo sapiens; identical to SEQ ID NO: 1541

SEQ ID NO: 1543 - protein, 448 aa, Homo sapiens
MPGLKRILTVTILALWLPHPGNAQQQCTNGFDLDRQTGQCLDIDECRTIPEACRGDMMCVNQNGGYLCIPRTNPVYRGPYSNPYSTSYSGPYPAAAPPVPASNYPTISRPLVCRFGYQMDEGNQCVDVDECATDSHQCNPTQICINTEGGYTCSCTDGYWLLEGQCLDIDECRYGYCQQLCANVPGSYSCTCNPGFTLNDDGRSCQDVNECETENPCVQTCVNTYGSFICRCDPGYELEEDGIHCSDMDECSFSEFLCQHECVNQPGSYFCSCPPGYVLLEDNRSCQDINECEHRNHTCTPLQTCYNLQGGFKCIDPIVCEEPYLLIGDNRCMCPAENTGCRDQPFTILFRDMDVVSGRSVPADIFQMQATTRYPGAYYIFQIKSGNEGREFYMRQTGPISATLVMTRPIKGPRDIQLDLEMITVNTVINFRGSSVIRLRIYVSQYPF

SEQ ID NO: 1544 - protein, 478 aa, Homo sapiens
MASLRPFFILALLALVSLADQESCKGRCTQGFMASKKCQCDELCTYYQSCCVDYMEQCKPQVTRGDVFTMPEDEYWSYDYPEETKNSTNAGVQSENTSLHFNLKPRAEETIKPTTPDPQEQSNTQEPEVGQQGVAPRPDTTDEGTSEFPEEELCSGKPFDAFTDLKNGSLFAFRGEYCYELDETAVRPGYPKLIQDVWGIEGPIDAAFTRINCQGKTYLFKGSQYWRFEDGVLDPDYPRNISEGFSGIPDNVDAALALPAHSYSGRERVYFFKGKQYWEYEFQQQPSQEECEGSSLSAVFEHFALLQRDSWENIFELLFWGRSSDGAKGPQFISRDWHGVPGKVDAAMAGRIYITGSTFRSVQAKKQKSGRRSRKRYRSRRGRGHSRSRSRSMSSRRPSRSVWFSLLSSEESGLGTYNYDYDMNWLIPATCEPIQSVYFFSGDKYYRVNLRTRRVDSVNPPYPRSIAQYWLGCPTSEK

SEQ ID NO: 1545 - protein, 500 aa, Homo sapiens
MDPALVLVLTLSSLLLLSLWRQSFGRGKLPPGPTPLPIIGNTLQIYMKDIGQSIKKFSKVYGPIFTLYLGMKPFVVLHGYEAVKEALVDLGEEFSGRGSFPVSERVNKGLGVIFSSGMQWKEIRRFSIMTLRTFGMGKRTIEDRIQEEAQCLVEELRKSKGAPFDPTFILGCAPCNVICSIIFQNRLDYKDPTFLNLMHRFNENFRLFSSPWLQVCNTFPAIIDYFPGSHNQVLKNFFYIKNYVLEKVKEHQESLDKDNPRDFIDCFLNKMEQEKHNPQSEFTLESLVATVTDMFGAGTETTSTTLRYGLLLLLKHVDVTAKVQEEIERVIGRNRSPCMKDRSQMPYTDAVVHEIQRYIDLVPTNLPHLVTRDIKFRNYFIPKGTNVIVSLSSILHDDKEFPNPEKFDPGHFLDERGNFKKSDYFMPFSAGKRICAGEALARTELFLFFTTILQNFNLKSLVDVKDIDTTPAISGFGHLPPFYEACFIPVQRADSLSSHL

SEQ ID NO: 1546 - protein, 500 aa, Homo sapiens; identical to SEQ ID NO: 1545

SEQ ID NO: 1547 - protein, 500 aa, Homo sapiens; identical to SEQ ID NO: 1545

SEQ ID NO: 1548 - protein, 385 aa, Homo sapiens
  misc_feature (59)..(59): Xaa is amino acid Selenocysteine
  misc_feature (264)..(264): Xaa is amino acid Selenocysteine
  misc_feature (282)..(282): Xaa is amino acid Selenocysteine
  misc_feature (323)..(323): Xaa is amino acid Selenocysteine
  misc_feature (335)..(335): Xaa is amino acid Selenocysteine
  misc_feature (357)..(357): Xaa is amino acid Selenocysteine
  misc_feature (371)..(371): Xaa is amino acid Selenocysteine
  misc_feature (373)..(373): Xaa is amino acid Selenocysteine
  misc_feature (380)..(380): Xaa is amino acid Selenocysteine
  misc_feature (382)..(382): Xaa is amino acid Selenocysteine
MWRSLGLALALCLLPYGGAESQGQSPACKQAPPWNIGDQNPMLNSEGTVTVVALLQASXYLCLLQASRLEDLRIKLENQGYFNISYIVVNHQGSPSQLKHAHLKKQVSDHIAVYRQDEHQTDVWTLLNGNKDDFLIYDRCGRLVYHLGLPYSFLTFPYVEEAIKIAYCEKRCGNCSFTSLEDEAFCKNVSSATASKTTEPSEEHNHHKHHDKHGHEHLGSSKPSENQQPGALDVETSLPPSGLHHHHHHHKHKGQHRQGHLESXDMGASEGLQLSLAQRKLXRRGCINQLLCKLSEESGAATSSCCCHCRHLIFEKSGSAITXQCAENLPSLCSXQGLFAEEKVIESCQCRSPPAAXHSQHVSPTEASPNXSXNNKTKKXKXNLN

SEQ ID NO: 1549 - protein, 253 aa, Homo sapiens
MKTQWSEILTPLLLLLLGLLHVSWAQSSCTGSPGIPGVPGIPGVPGSDGKPGTPGIKGEKGLPGLAGDHGELGEKGDAGIPGIPGKVGPKGPVGPKGAPGPPGPRGPKGGSGDYKATQKVAFSALRTVNSALRPNQAIRFEKVITNVNDNYEPRSGKFTCKVPGLYYFTYHASSRGNLCVNIVRGRDRDRMQKVLTFCDYAQNTFQVTTGGVVLKLEQEEVVHLQATDKNSLLGVEGANSIFTGFLLFPDMDV

SEQ ID NO: 1550 - protein, 376 aa, Homo sapiens
MSTAGKVIKCKAAVLWEPHKPFTIEDIEVAPPKAHEVRIKMVATGVCRSDDHAVSGSLFTPLPAVLGHEGAGIVESIGEGVTCVKPGDKVIPLFSPQCGKCRICKHPESNLCCQTKNLTQPKGALLDGTSRFSCRGKPIHHFISTSTFSQYTVVDDIAVAKIDAAAPLDKVCLIGCGFSTGYGSAVQVAKVTPGSTCAVFGLEGVGLSVVIGCKTAGAAKIIAVDINKDKFAKAKELGATDCINPQDYTKPIQEVLQEMTDGGVDFSFEVIGRLDTMTSALLSCHSACGVSVIVGVPPSAQSLSVNPMSLLLGRTWKGAIFGGFKSKDAVPKLVADFMAKKFPLEPLITHVLPFEKINEAFDLLRAGKSIRTVLTF

SEQ ID NO: 1551 - protein, 372 aa, Homo sapiens
MAYHSFLVEPISCHAWNKDRTQIAICPNNHEVHIYEKSGAKWNKVHELKEHNGQVTGIDWAPESNRIVTCGTDRNAYVWTLKGRTWKPTLVILRINRAARCVRWAPNENKFAVGSGSRVISICYFEQENDWWVCKHIKKPIRSTVLSLDWHPNNVLLAAGSCDFKCRIFSAYIKEVEERPAPTPWGSKMPFGELMFESSSSCGWVHGVCFSAGGSRVAWVSHDSTVCLVDAEKKMAVATLASETLPLLAITFITENSLVAAGHDCFPVLFTYDNAAGTLSFGGRLDVPKQNSQRGLTARERFQNLDKKASSEGGAATGAGLDSLHKNSVSQISVLSGGKAKCSQFCTTGMDGGMSIWDVKSLESALKDLKIR

SEQ ID NO: 1552 - protein, 372 aa, Homo sapiens; identical to SEQ ID NO: 1551

SEQ ID NO: 1553 - protein, 260 aa, Homo sapiens
MAKEWGYASHNGPEHWHELYPIAKGDNQSPIELHTKDIRHDPSLQPWSVSYDPGSAKTILNNGKTCRVVFDDTFDRSMLRGGPLSGPYRLRQFHLHWGSSDDHGSEHTVDGVKYAAELHLVHWNPKYNTFGEALKQPDGIAVVGIFLKIGREKGEFQILLDALDKIKTKGKEAPFNHFDPSCLFPACRDYWTYHGSFTTPPCEECIVWLLLKEPMTVSSDQMAKLRSLFASAENEPPVPLVGNWRPPQPIKGRVVRASFK

SEQ ID NO: 1554 - protein, 621 aa, Homo sapiens
MEASSPLDPVGRLVAFCRGGVHLAVLLLFLSPSTLGQCPAPPLFPYAKPINPTDESTFPVGTSLKYECRPGYIKRQFSITCEVNSVWTSPQDVCIRKQCETPLDPQNGIVHVNTDIRFGSSITYTCNEGYRLIGSSSAMCIISDQSVAWDAEAPICESIPCEIPPSIPNGDFFSPNREDFHYGMVVTYQCNTDARGKKLFNLVGEPSIHCTSIDGQVGVWSGPPPQCIELNKCTPPHVENAVIVSKNKSLFSLRDMVEFRCQDGFMMKGDSSVYCRSLNRWEPQLPSCFKVKSCGAFLGELPNGHVFVPQNLQLGAKVTFVCNTGYQLKGNSSSHCVLDGVESIWNSSVPVCEQVICKLPQDMSGFQKGLQMKKDYYYGDNVALECEDGYTLEGSSQSQCQSDASWDPPLPKCVSQVICKLPQDMSGFQKGLQMKKDYYYGDNVALECEDGYTLEGSSQSQCQSDASWDPPLPKCVSQVICKLPQDMSGFQKGLQMKKDYYYGDNVALECEDGYTLEGSSQSQCQSDASWDPPLPKCVSRSNSGLIAGIFIGIIVLILFIIFSYWMIMKFKKRNSTNEKCKEVGIYLNSKEDSCVQPQSLLTSQENNSTSSPARNSLTQEV

SEQ ID NO: 1555 - protein, 491 aa, Homo sapiens
MDGVSTAILLLLLAVISLSLTFTSWGKGQLPPGPKPLPILGNLLQLRSQDLLTSLTKLSKDYGSVFTVYLGPRRVIVLSGYQTVKEALVDKGEEFSGRGSYPIFFNFTKGNGIAFSDGERWKILRRFSVQILRNFGMGKRSIEERILEEGSFLLDVLRKTEGKPFDPVFILSRSVSNIICSVIFGSRFDYDDERLLTIIHFINDNFQIMSSPWGEMYNIFPSLLDWVPGPHRRVFRNFGGMKDLIARSVREHQDSLDPNSPRDFIDCFLTKMVQEKQDPLSHFNMDTLLMTTHNLLFGGTETVGTTLRHAFLILMKYPKVQARVQEEIDCVVGRSRMPTLEDRASMPYTDAVIHEVQRFADVIPMNLPHRVIRDTPFRGFLIPKGTDVITLLNTVHYDSDQFKTPQEFNPEHFLDANQSFKKSPAFMPFSAGRRLCLGEPLARMELFIYLTSILQNFTLHPLVEPEDIDLTPLSSGLGNLPRPFQLCMRIR

SEQ ID NO: 1556 - protein, 315 aa, Homo sapiens
MPGLSCRFYQHKFPEVEDVVMVNVRSIAEMGAYVSLLEYNNIEGMILLSELSRRRIRSINKLIRIGRNECVVVIRVDKEKGYIDLSKRRVSPEEAIKCEDKFTKSKTVYSILRHVAEVLEYTKDEQLESLFQRTAWVFDDKYKRPGYGAYDAFKHAVSDPSILDSLDLNEDEREVLINNINRRLTPQAVKIRADIEVACYGYEGIDAVKEALRAGLNCSTETMPIKINLIAPPRYVMTTTTLERTEGLSVLNQAMAVIKEKIEEKRGVFNVQMEPKVVTDTDETELARQLERLERENAEVDGDDDAEEMEAKAED

SEQ ID NO: 1557 - protein, 932 aa, Homo sapiens
MKSPAPAHMWNIVLVLLSLLAVLPITTTEKNGIDIYSLTVDSRVSSRFAHTVVTSRVVNRADTVQEATFQVELPRKAFITNFSMIIDGVTYPGLSKRRLKPEAIHCCCGRGESAGLVKTTGRKTEQFEVSVNVAPGSKTTFELIYQELLQRRLGMYELLLKVRPEQLVKHLQMTSTSLSPQGISTLETESTFMTQELANALTTSQNKTKAHIQFKPTLSQQRKSQNEQDTVLDGDFTVRYDVDRSSTGGYLQIENGYFVHHFAPEDLPTMAKNVLFVIDKSGSMAGKKIQQTREALIKILKDLSTQDQFNIIVFSGEANQWEQLLVQATEENLNRAVDYASKIPAQGGTNINKAVLSAVELLDKSNQAELLPSKSVSLIILLTDGEPTVGETNPKIIQKNTQEAINGRYSLFCLGFGFDVNYPFLEKLALDNGGLARRIYEDSDSALQLQDFYQEVANPLLSSVTFEYPSNAVEDVTRYNFQHHFKGSEMVVAGKLRDQGPDVLLAKVSGQMHLQNITFQTEASIAQQEKEFQGPKYIFHNFMERLWALLTIQQQLEQRISASGAELEALEAQVLNLSLKYNFVTPLTHMVVTKPEDQEQFQVAEKPTEVDGGVWSILSAVQRHFKTPTTGSKLLTSRLRGNRFQTLSRLGDGLVGSRQYMPPPGLPGPPGLPGPPGPPGHPHFASSIDYGRQPSLGRVLDLPSLSSQDPAGPSLAMLPKVVEQEGTTPEESPNPDHPRAPTIILPLPGSGVDQLCVDILHSEKPMKLFVDINQGLEVVGKYEKNIGFSWIEVTILKPHLQVHATPERLVVTRGRKNSEYKWKKTLFSVLPGLKMTMDKTGLLQLSGPDKVTISLLSLDDPQRGLMLLLNDTHHFSNDITGELGQFYQDIIWDDTKQTVRVLGIDYPATRELKLSYQDGFPGTEISCWTVKI

SEQ ID NO: 1558 - protein, 524 aa, Homo sapiens
MSQLSLSWLGLGPEVAFPWQTLLLFGASWILAQILTQIYAAYRNFRRLRGFPQPPKRNWLMGHVGMVTPTEQGLKELTRLVGTYPQGFLMWIGPMVPVITLCHSDIVRSILNASAAVALKDVIFYTILKPWLGDGLLVSAGDKWSRHRRMLTPAFHFNILKPYVKIFNDSTNIMHAKWKRLISEGSSRLDMFEHVSLMTLDSLQKCVFSFDSNCQEKSSEYIAAILELSALVAKRHQQPLLFMDLLYNLTPDGMRFHKACNLVHEFTDAVIRERRRTLPDQGLDEFLKSKAKSKTLDFIDVLLLTKDEDGKELSDEDIRAEADTFMFEGHDTTASGLSWILYNLAKHPEYQERCRQEVQELLRDRDPEEIEWDDLAQLPFLTMCIKESLRLHPPVTVISRCCTQDILLPDGRTIPKGIICLISIFGIHHNPSVWPDPEVYNPFRFDPENIKDSSPLAFIPFSAGPRNCIGQTFAMSEMKVALALTLLRFRLLPDDKEPRRQPELILRAEGGLWLRVEPLSAGAQ

SEQ ID NO: 1559 - protein, 286 aa, Homo sapiens
MERCVRVKSWVEENRASFQPPVCNKLMHREQLKIMFVGGPNTRKDYHIEEGEEVFYQLEGDMVLRVLEQGEHRDVVIRQGEIFLLPARVPHSPQRFANTMGLVIERRRMETELDGLRYYVGDTEDVLFEKWFHCKDLGTQLAPIIQEFFHSEQYRTGKPNPDQLLKEPPFPLSTRSVMEPMSLKAWLESHSRELQAGTSLSLFGDSYETQVIAHGQGSSKGPRQDVDVWLWQLEGSSKVTMGGQCVALAPDDSLLVPAGFSYMWERAQGSVALSVTQDPACKKPLG

SEQ ID NO: 1560 - protein, 185 aa, Homo sapiens
MATALGFRCLYRTRPATLGRYVDRLWRSPSRGHRLSPADDELYQRTRISLLQNEFPQAVYIDSYNSRGFTINGNRVFGPCALLPQTVVQWNVGSHQDITEESFSIFWMLEPRIEIVVVGTGNKTERLHSQVLQAMRQRGIAVEIQDTPNACATFNFLCHEGRVTGAALIPPPGETALASSGQTTE

SEQ ID NO: 1561 - protein, 147 aa, Homo sapiens
MDIQRTQSLLLLLLLTLLGLGLVQPSYGQDRMYQRFLRQHVDPEGTGGSDNYCNVMMQRRRMTSTQCKRFNTFIHEDIWNIRSICDTANIPCKNGNMNCHEGIVRVTDCRETGSSVPHNCRYRARASTRRVVIACEGTPEVPVHFDR

SEQ ID NO: 1562 - protein, 331 aa, Homo sapiens
MSDAAEEQPMETTGATENGHEAAPEGEAPVEPSPGSGPATPAGSVGGTTAAPSGNQNGAEGDQINASKNEEDAGKMFVGGLSWDTSKKDLKDYFTKFGEVVDCTIKMDPNTGRSRGFGFILFKDSSSVEKVLDQKEHRLDGRVIDPKKAMAMKKDPVKKIFVGGLNPEATEEKIREYFGQFGEIEAIELPIDPKLNKRRGFVFITFKEEDPVKKVLEKKFHTVSGSKCEIKVAQPKEVYQQQQYGSGGRGNRNRGNRGSGGGQSQSWNQGYGNYWNQGYGYQQGYGPGYGGYDYSPYGYYGYGPGYDYSQGSTNYGKSQRRGGHQNNYKPY

SEQ ID NO: 1563 - protein, 461 aa, Homo sapiens
MASESGKLWGGRFAGSVDPTMDKFNSSIAYDRHLWNVDLQGSKAYSRGLEKAGLLTKAEMQQILQGLDKVAEEWAQGIFKLYPNDEDIHTANERRLKELIGEAAGKLHTGRSRNDQVVTDLRLWMRQTCSKLSTFLKVLIEAMVDRAEAECEVLFPGYTHLQRAQPIRWSHWILSHAVALTRDLERLKEVQKRINVLPLGSGAIAGNPLGVDREFLCAELNFGAITLNSMDATSERDFVAEFLFWASLCMTHLSRMAEDLILYGTKEFNFVQLSDAYSTGSSLMPQKKNPDSLELIRSKAGRVFGRCAGLLMTLKGLPSTYNKDLQEDKEAVFEVSDTMTAVLQVATGVISTLQIHRENMAQALSPDMLATDLAYYLVRKGMPFRQAHEASGKAVVVAEMKGVALNQLSLQELQTVSPLFSSDVNLVWDYSHSVEQYTALGGTAQSSVEWQISQVRALLQM

SEQ ID NO: 1564 - protein, 478 aa, Homo sapiens
MASSDTEGKRVVVIGGGLVGALNACFLAKRNFQVDVYEAREDIRVANFMRGRSINLALSYRGRQALKAVGLEDQIVSKGVPMKARMIHSLSGKKSAIPYGNKSQYILSISREKLNKDLLTAVESYPNAKVHFGHKLSKCCPEEGILTMLGPNKVPRDITCDLIVGCDGAYSTVRAHLMKKPRFDYSQQYIPHGYMELTIPPKNGEYAMEPNCLHIWPRNAFMMIALPNMDKSFTCTLFMSFEEFEKLPTHSDVLDFFQKNFPDAIPLMGEQALMRDFFLLPAQPMISVKCSPFHLKSRCVLMGDAAHAIVPFFGQGMNAGFEDCLVFDELMDKFNNDLSVCLPEFSRFRIPDDHAISDLSMYNYIEMRAHVNSRWFLFQRLLDKFLHALMPSTFIPLYTMVAFTRIRYHEAVLRWHWQKKVINRGLFVLGSLVAIGSAYILVHHLSPRPLELLRSAWTGTSGHWNRSADISPRVPWSH

SEQ ID NO: 1565 - protein, 257 aa, Homo sapiens
  misc_feature (126)..(126): Xaa is amino acid Selenocysteine
MGLSQLWLWLKRLVIFLQVALEVATGKVLMTLFPERVKQNILAMGQKTGMTRNPRFAPDNWVPTFFSIQYFWFVLKVRWQRLEDRAEYGGLAPNCTVVRLSGQKCNVWDFIQGSRPLVLNFGSCTXPSFLLKFDQFKRLVDDFASTADFLIIYIEEAHATDGWAFKNNVDIRQHRSLQDRLRAAHLLLARSPQCPVVVDTMQNQSSQLYAALPERLYVIQEGRICYKGKPGPWNYNPEEVRAVLEKLCIPPGHMPQF

SEQ ID NO: 1566 - protein, 257 aa, Homo sapiens; identical to SEQ ID NO: 1565
  misc_feature (126)..(126): Xaa is amino acid Selenocysteine

SEQ ID NO: 1567 - protein, 502 aa, Homo sapiens
MEKEDQEKTGKLTLVLALATFLAAFGSSFQYGYNVAAVNSPSEFMQQFYNDTYYDRNKENIESFTLTLLWSLTVSMFPFGGFIGSLMVGFLVNNLGRKGALLFNNIFSILPAILMGCSKIAKSFEIIIASRLLVGICAGISSNVVPMYLGELAPKNLRGALGVVPQLFITVGILVAQLFGLRSVLASEEGWPILLGLTGVPAGLQLLLLPFFPESPRYLLIQKKNESAAEKALQTLRGWKDVDMEMEEIRKEDEAEKAAGFISVWKLFRMQSLRWQLISTIVLMTGQQLSGVNAIYYYADQIYLSAGVKSNDVQYVTAGTGAVNVFMTMVTVFVVELWGRRNLLLIGFSTCLTACIVLTVALALQNTISWMPYVSIVCVIVYVIGHAVGPSPIPALFITEIFLQSSRPSAYMIGGSVHWLSNFIVGLIFPFIQVGLGPYSFIIFAIICLLTSIYIFMVVPETKGRTFVEINQIFAKKNKVSDVYPEKEEKELNDLPPATREQ

SEQ ID NO: 1568 - protein, 469 aa, Homo sapiens
MNLIGPSHLQATDEFALSENLFGVLTEHAAGPLGQNLDLESYSPYNNVQFPQVQPQISSSSYYSNLGFYPQQPEDWYSPGLYELRRMPTESVYQGETEVSEMPVTKKPRMAASSAGRIKGDELCVVCGDRASGYHYNALTCEGCKGFFRRSITKNAVYKCKNGGNCVMDMYMRRKCQDCRLRKCREMGMLAECLLTEIQCKSKRLRKNVKQHADQTVNEDSEGRDLRQVTSTTKLCREKTELTVDQQTLLDYIMDSYSKQRMPQEITNKILKEEFSAEENFLILTEMATSHVQILVEFTKRLPGFQTLDHEDQIALLKGSAVEAMFLRSAEIFNKKLPAGHADLLEERIRKSGISDEYITPMFSFYKSVGELKMTQEEYALLTAIVILSPDRQYIKDREAVEKLQEPLLDVLQKLCKIYQPENPQHFACLLGRLTELRTFNHHHAEMLMSWRVNDHKFTPLLCEIWDVQ

SEQ ID NO: 1569 - protein, 493 aa, Homo sapiens
MADSKPLRTLDGDPVAVEALLRDVFGIVVDEAIRKGTNASEKVCEWKEPEELKQLLDLELQSQGESRERILERCRAVIHYSVKTGHPRFFNQLFSGLDPHALAGRIITESLNTSQYTYEIAPVFVLMEEEVLKKLRALVGWNTGDGVFCPGGSISNMYAINLARFQRYPDCKQRGLRALPPLALFTSKECHYSITKGAAFLGLGTDSVRVVKADERGKMIPEDLERQISLAEAEGSVPFLVSATSGTTVLGAFDPLDAIADVCQRHGLWLHVDAAWGGSVLLSRTHRHLLDGIQRADSVAWNPHKLLAAGLQCSALLLRDTSNLLKRCHGSQASYLFQQDKFYNVALDTGDKVVQCGRRVDCLKLWLMWKAQGGQGLEWRIDQAFALTRYLVEEIKKREGFELVMEPEFVNVCFWFVPPSLRGKKESPDYSQRLSQVAPVLKERMVKKGTMMIGYQPHGTRANFFRMVVANPILVQADIDFLLGELERLGQDL

SEQ ID NO: 1570 - protein, 493 aa, Homo sapiens; identical to SEQ ID NO: 1569

SEQ ID NO: 1571 - protein, 534 aa, Homo sapiens
MLVLFETSVGYAIFKVLNEKKLQEVDSLWKEFETPEKANKIVKLKHFEKFQDTAEALAAFTALMEGKINKQLKKVLKKIVKEAHEPLAVADAKLGGVIKEKLNLSCIHSPVVNELMRGIRSQMDGLIPGVEPREMAAMCLGLAHSLSRYRLKFSADKVDTMIVQAISLLDDLDKELNNYIMRCREWYGWHFPELGKIISDNLTYCKCLQKVGDRKNYASATLSEFLSEEVEAEVKAAAEISMGTEVSEEDICNILHLCTQVIEISEYRTQLYEYLQNRMMAIAPNVTVMVGELVGARLIAHAGSLLNLAKHAASTVQILGAEKALFRALKSRRDTPKYGLIYHASLVGQTSPKHKGKISRMLAAKTVLAIRYDAFGEDSSSAMGAENRAKLEARLRILEDRGIRKISGTGKALAKAEKYEHKSEVKTYDPSGDSTLPTCSKKRKIEEVDKEDEITEKKAKKAKIKIKAEVEEEMEEAEEEQVVEEEPTVKKKKKKDKKKHIKEEPLSEEEPCTSTAVPSPEKKKKKKKKKDAED

SEQ ID NO: 1572 - protein, 514 aa, Homo sapiens
MVEEVQKHSVHTLVFRSLKRTHDMFVADNGKPVPLDEESHKRKMAIKLRNEYGPVLHMPTSKENLKEKGPQNAPDSYPHKQYPANQGQDVEYLVTGTHPYPPGPGVALTADTKIQRMPSESAAQSLAVALPSQTRVDANRTAPAGSEYRHPGASDRSQPTAMNSMIMETSNTKNSALMAKKAPTMPKPQWHPPWKLYRVISGHLGWVRCIAVEPGNQWFVTGSADRTIKIWDLASGKLKLSLTGHISTVRGVIVSTRSPYLFSCGEDKQVKCWDLEYNKVIRHYHGHLSAVYGLDLHPTIDVLVTCSRDSTARIWDVRTKASVHTLSGHTNAVATVRCQAAEPQIITGSHDTTIRLWDLVAGKTRVTLTNHKKSVRAVVLHPLHYTFASGSPDNIKQWKFPDGGFIQNLSGHNAIINTLAVNTDGVLVSGADNGTMHLWDWRTGYNFQRVHAAVQPGSLDSESGIFACAFDRSESRLLTAEADKTIKVYREDETATEETHPVSWKPEIIKRKRF

SEQ ID NO: 1573 - protein, 440 aa, Homo sapiens
MVHGYKGVQFQNWAKTYGCSPEVYYQPTSVEEVREVLALAREQKKKVKVVGGGHSPSDIACTDGFMIHMGKMNRVLQVDKEKKQITVEAGILLADLHPQLDEHGLAMSNLGAVSDVTVAGVIGSGTHNTGIKHGILATQVVALTLMTADGEVLECSESRNADVFQAARVHLGCLGIILTVTLQCVPQFQLQETSFPSTLKEVLDNLDSHLKRSEYFRFLWFPHTENVSIIYQDHTNKAPSSASNWFWDYAIGFYLLEFLLWTSTYLPCLVGWINRFFFWMLFNCKKESSNLSHKIFTYECRFKQHVQDWAIPREKTKEALLELKAMLEAHPKVVAHYPVEVRFTRGDDILLSPCFQRDSCYMNIIMYRPYGKDVPRLDYWLAYETIMKKFGGRPHWAKAHNCTQKDFEEMYPTFHKFCDIREKLDPTGMFLNSYLEKVFY

SEQ ID NO: 1574 - protein, 134 aa, Homo sapiens
MAEQSDKDVKYYTLEEIQKHKDSKSTWVILHHKVYDLTKFLEEHPGGEEVLREQAGGDATENFEDVGHSTDARELSKTYIIGELHPDDRSKIAKPSETLITTVESNSSWWTNWVIPAISALVVALMYRLYMAED

SEQ ID NO: 1575 - protein, 850 aa, Homo sapiens
MAKPLTDQEKRRQISIRGIVGVENVAELKKGFNRHLHFTLVKDRNVATPRDYYFALAHTVRDHLVGRWIRTQQHYYDKCPKRVYYLSLEFYMGRTLQNTMINLGLQNACDEAIYQLGLDMEELEEIEEDAGLGNGGLGRLAACFLDSMATLGLAAYGYGIRYEYGIFNQKIREGWQVEEADDWLRHGNPWEKARPEFMLPVHFYGRVEHTQAGTKWVDTQVVLALPYDTPVPGYMNNTVNTMRLWSARAPNDFNLQDFNVGDYIQAVLDRNLAENISRVLYPNDNFFEGKELRLKQEYFVVAATLQDVIRRFKASKFGSKDGVGTVFDAFPDQVAIQLNDTHPALAIPELMRIFVDIEKLPWSKAWEITKKTFAYTNHTVLPEALERWPVDLVEKLLPRHLQIIYEINQKHLDRIVALFPKDIDRMRRMSLIEEEGGKRINMAHLCIVGCHAVNGVAKIHSDIVKTQVFKDFSELEPDKFQNKTNGITPRRWLLLCNPGLADLIAEKIGEDYVKDLSQLTKLHSFVGDDIFLREIAKVKQENKLKFSQFLEKEYKVKINPSSMFDVHVKRIHEYKRQLLNCLHVITMYNRIKKDPKKFFVPRTVIIGGKAAPGYHMAKMIIKLVTSVAEVVNNDPMVGSKLKVIFLENYRVSLAEKVIPATDLSEQISTAGTEASGTGNMKFMLNGALTIGTMDGANVEMAEEAGEENLFIFGMRVDDVAALDKKGYEAKEYYEALPELKLVIDQIDNGFFSPNQPDLFKDIINMLFYHDRFKVFADYEAYVKCQEKVSQLYMNQKAWNTMVLRNIAASGKFSSDRTIREYAKDIWNMEPSDLKISLSKESSNGVNANGK

SEQ ID NO: 1576 - protein, 850 aa, Homo sapiens; identical to SEQ ID NO: 1575

SEQ ID NO: 1577 - protein, 703 aa, Homo sapiens
MDASPEPPQKGGTLVLVRRQPPVSQGLLETLKARLKKSCTCSMPCAQALVQGLFPVIRWLPQYRLKEYLAGDVMSGLVIGIILVPQAIAYSLLAGLQPIYSLYTSFFANLIYFLMGTSRHVNVGIFSLLCLMVGQVVDRELQLAGFDPSQDSLGPGNNDSTLNNTATLTVGLQDCGRDCHAIRIATALTLMAGLYQVLMGILRLGFVSTYLSQPLLDGFAMGASVTILTSQAKHLLGVRIPRHQGLGMVIHTWLSLLQNVGQANLCDVVTSAVCLAVLLTAKELSDRYRHYLKVPVPTELLVIVVATIASHFGQLHTRFGSSVAGNIPTGFVAPQIPDPKIMWSVALDAMSLALVGSAFSISLAEMFARSHGYSVSANQELLAVGCCNVLPAFFHCFATSAALSKTLVKIATGCQTQLSSVVSAAVVLLVLLVLAPLFHDLQRCVLACIIVVSLRGALRKVKDLPQLWRLSPADALVWVATAATCVLVSIEAGLLAGVFFSLLSLAGRTQRPRAALLARIGDSTFYEDAAEFEGLLPPPEVRVFRFTGPLYYANKDFFLRSLYSLTGLDAGYSATRKDRGTEVGVSNRSLVDRKDLGSVSSGDGLVVPLAFGFHTVVIDCAPLLFLDVAGMATLKDLRKNYRALDITLLLACCSPSVRDTLRKGGFLGEDQGTAEELLFPSVHSAVETACARREELMAADSAL

SEQ ID NO: 1578 - protein, 181 aa, Homo sapiens
MGGFFSSIFSSLFGTREMRILILGLDGAGKTTILYRLQVGEVVTTIPTIGFNVETVTYKNLKFQVWDLGGQTSIRPYWRCYYSNTDAVIYVVDSCDRDRIGISKSELVAMLEEEELRKAILVVFANKQDMEQAMTPSEMANALGLPALKDRKWQIFKTSATKGTGLDEAMEWLVETLKSRQ

SEQ ID NO: 1579 - protein, 471 aa, Homo sapiens
MASKSQHNASKAKNHNVKAESQGQWGRAWEVDWFSLVSVIFLLLFAPFIVYYFIMACDQYSCSLTAPILDVATGRASLADIWAKTPPVTAKAAQLYALWVSFQVLLYSWLPDFCHRFLPGYVGGVQEGAITPAGIVNKYEVNGLQAWLITHFLWFVNAYLLSWFSPTIIFDNWIPLLWCANILGYAVSTFAMIKGYLFPTSAEDCKFTGNFFYNYMMGIEFNPRIGKWFDFKLFFNGRPGIVAWTLINLSFAAKQQELYGHVTNSMILVNVLQAIYVLDFFWNETWYLKTIDICHDHFGWYLGWGDCVWLPYLYTLQGLYLVYHPVQLSTPNALGVLLLGLVGYYIFRMTNHQKDLFRRTDGHCLIWGKKPKAIECSYTSADGLKHRSKLLVSGFWGVARHFNYTGDLMGSLAYCLACGGGHLLPYFYIIYMTILLTHRCLRDEHRCANKYGRDWERYVAAVPYRLLPGIF

SEQ ID NO: 1580 - protein, 471 aa, Homo sapiens; identical to SEQ ID NO: 1579

SEQ ID NO: 1581 - protein, 241 aa, Homo sapiens
MAASGEARRVLVYGGRGALGSRCVQAFRARNWWVASIDVVENEEASASVIVKMTDSFTEQADQVTAEVGKLLGDQKVDAILCVAGGWAGGNAKSKSLFKNCDLMWKQSIWTSTISSHLATKHLKEGGLLTLAGAKAALDGTPGMIGYGMAKGAVHQLCQSLAGKNSGMPSGAAAIAVLPVTLDTPMNRKSMPEADFSSWTPLEFLVETFHDWITGNKRPNSGSLIQVVTTDGKTELTPAYF

SEQ ID NO: 1582 - protein, 241 aa, Homo sapiens; identical to SEQ ID NO: 1581

SEQ ID NO: 1583 - protein, 259 aa, Homo sapiens
MPRLHDHVWSYPSAGAARPYSLPRGMIAAALCPQGPGAPEPEPAPRGQREGTAGFSARPGSWHHDLVQRSLVLFSFGVVLALVLNLLQIQRNVTLFPDEVIATIFSSAWWVPPCCGTAAAVVGLLYPCIDSHLGEPHKFKREWASVMRCIAVFVGINHASAKLDFANNVQLSLTLAALSLGLWWTFDRSRSGLGLGITIAFLATLITQFLVYNGVYQYTSPDFLYIRSWLPCIFFSGGVTVGNIGRQLAMGVPEKPHSD

SEQ ID NO: 1584 - protein, 259 aa, Homo sapiens; identical to SEQ ID NO: 1583

SEQ ID NO: 1585 - protein, 415 aa, Homo sapiens
MMLGPEGGEGYVVKLRGLPWSCSIEDVQNFLSDCTIHDGVAGVHFIYTREGRQSGEAFVELESEDDVKLALKKDRESMGHRYIEVFKSHRTEMDWVLKHSGPNSADSANDGFVRLRGLPFGCTKEEIVQFFSGLEIVPNGITLPVDPEGKITGEAFVQFASQELAEKALGKHKERIGHRYIEVFKSSQEEVRSYSDPPLKFMSVQRPGPYDRPGTARRYIGIVKQAGLDRMRSGAYSAGYGGYEEYSGLSDGYGFTTDLFGRDLSYCLSGMYDHRYGDSEFTVQSTTGHCVHMRGLPYKATENDIYNFFSPLNPVRVHIEIGPDGRVTGEADVEFATHEEAVAAMSKDRANMQHRYIELFLNSTTGASNGAYSSQVMQGMGVSAAQATYSGLESQSVSGCYGAGYSGQNSMGGYD

SEQ ID NO: 1586 - protein, 406 aa, Homo sapiens [sequence omitted]

SEQ ID NO: 1587 - protein, 501 aa, Homo sapiens
MSSPAQPAVPAPLANLKIQHTKIFINNEWHDSVSGKKFPVLNPATEEVICHVEEGDKADVDKAVKAARQAFQIGSPWRTMDASERGRLLNKLADLMERDRLLLATIEAINGGKVFANAYLSDLGGSIKALKYCAGWADKIHGQTIPSDGDIFTFTRREPIGVCGQIIPWNFPLLMFIWKIGPALSCGNTVVVKPAEQTPLTALHMASLIKEAGFPPGVVNIVPGYGPTAGAAISSHMDVDKVAFTGSTQVGKLIKEAAGKSNLKRVTLELGGKSPCIVFADADLDIAVEFAHHGVFYHQGQCCVAASRIFVEESVYDEFVRKSVERAKKYVLGNPLTQGINQGPQIDKEQHDKILDLIESGKKEGAKLECGGGRWGNKGFFVQPTVFSNVTDEMRIAKEEIFGPVQQIMKFKSIDDVIKRANNTTYGLAAGVFTKDLDRAITVSSALQAGVVWVNCYMILSAQCPFGGFKMSGNGRELGEHGLYEYTELKTVAMKISQKNS

SEQ ID NO: 1588 - protein, 208 aa, Homo sapiens
MASKCPKCDKTVYFAEKVSSLGKDWHKFCLKCERCNKTLTPGGHAEHDGKPFCHKPCYATLFGPKGVNIGGAGSYIYEKPPTEAPQVTGPIEVPVVRTEERKTSGPPKGPSKASSVTTFTGEPNMCPRCNKRVYFAEKVTSLGKDWHRPCLRCERCSKTLTPGGHAEHDGQPYCHKPCYGILFGPKGVNTGAVGSYIYDKDPEGTVQP

SEQ ID NO: 1589 - protein, 421 aa, Homo sapiens
MACARPLISVYSEKGESSGKNVTLPAVFKAPIRPDIVNFVHTNLRKNNRQPYAVSELAGHQTSAESWGTGRAVARIPRVRGGGTHRSGQGAFGNMCRGGRMFAPTKTWRRWHRRVNTTQKRYAICSALAASALPALVMSKGHCVEEVPELPLVVEDKVESYKKTKEAVQLLKKLKAWNDIKKVYASQRMRAGKGKMRNRRRIQRRGPCIIYNEDNGIIKAFRNIPGITLLNVSKLNILKLAPGGHVGRFCIWTESAFRKLDELYGTWRKAASLKSNYNLPMHKMMNTDLSRILKSPEIQRALRAPRKKIHRRVLKKNPLKNLRIMLKLNPYAKTMRRNTILRQARNHKLRVKKLEAAAAALAAKSEKIVPEKGAGDKKPAVGKKGKKPVDAKKLKKPAGKKVVTKKPAEKKPTTEEKKSAA

SEQ ID NO: 1590 - protein, 140 aa, Homo sapiens
MAGWNAYIDSLMADGTCQDAAIVGYKDSPSVWAAVPGKTFVSITPAEVGVLVGKDRSSFFVNGLTLGGQKCSVIRDSLLQDGEFTMDLRTKSTGGAPTFNVTVTMTAKTLVLLMGKEGVHGGLINKKCYEMASHLRRSQY

SEQ ID NO: 1591 - protein, 299 aa, Homo sapiens
MGTAEDVFRKDLKIIHGYPMVYAFALGWEKIEEFQSRPCDIVIPTYPKSGTTWLSEIVDMVLNDGNVGKCKRDVITSKVPMLEQNVPGARRSGVELLKKTPSPRIIKTHLPIDLLPKSFWDNKCKMIYLARNGKDVAVSYYHFDLMNNIQPLPGTWEEYLEKFLAGNVAYGSWFDHVKSWWEKREGHPILFLYYEDLKKNPKKEIKKIANFLDKTLDEHTLERIVHHTSFEVMKDNPLVNYTHLPTEIMDHSKSPFMRKGVVGDWKNYFTMTQSEKFDAIYKKKLSGTTLEFCTDIQSA

SEQ ID NO: 1592 - protein, 181 aa, Homo sapiens
MGNIFANLFKGLFGKKEMRILMVGLDAAGKTTILYKLKLGEIVTTIPTIGFNVETVEYKNISFTVWDVGGQDKIRPLWRHYFQNTQGLIFVVDSNDRERVNEAREELMRMLAEDELRDAVLLVFANKQDLPNAMNAAEITDKLGLHSLRHRNWYIQATCATSGDGLYEGLDWLSNQLRNQK

SEQ ID NO: 1593 - protein, 439 aa, Homo sapiens
MLSKLASLQTVAALRRGLRTSVASATSVATKKTEQGPPSSEYIFERESKYGAHNYHPLPVALERGKGIYMWDVEGRQYFDFLSAYGAVSQGHCHPKIIEAMKSQVDKLTLTSRAFYNNVLGEYEEYITKLFNYNKVLPMNTGVEAGETACKLARRWGYTVKGIQKYKAKIVFAVGNFWGRTLSAVSSSTDPTSYDGFGPFMPGFETIPYNDLPALERALQDPNVAAFMVEPIQGEAGVIVPDPGYLTGVRELCTRHQVLFIADEIQTGLARTGRWLAVDHENVRPDIVLLGKALSGGLYPVSAVLCDDDIMLTIKPGEHGSTYGGNPLGCRIAIAALEVLEEEHLAENADKMGAILRKELMKLPSDVVTAVRGKGLLNAIVIRETKDCDAWKVCLRLRDNGLLAKPTHGDIIRLAPPLVIKEDEIRESVEIINKTILSF

SEQ ID NO: 1594 - protein, 439 aa, Homo sapiens; identical to SEQ ID NO: 1593

SEQ ID NO: 1595 - protein, 480 aa, Homo sapiens
MAGVEEASSFGGHLNRDLDPDDREEGTSSTAEEAAKKKRRKKKKGKGAVSAGQQELDKESGTSVDEVAKQLERQALEEKEKDDDDEDGDGDGDGAAGKKKKKKKKKRGPRVQTDPPSVPICDLYPNGVFPKGQECEYPPTQDGRTAAWRTTSEEKKALDQASEEIWNDFREAAEAHRQVRKYVMSWIKPGMTMIEICEKLEDCSRKLIKENGLNAGLAFPTGCSLNNCAAHYTPNAGDTTVLQYDDICKIDFGTHISGRIIDCAFTVTFNPKYDILLKAVKDATNTGIKCAGIDVRLCDVGEAIQEVMESYEVEIDGKTYQVKPIRNLNGHSIGPYRIHAGKTVPIVKGGEATRMEEGEVYAIETFGSTGKGVVHDDMECSHYMKNFDVGHVPIRLPRTKHLLNVINENFGTLAFCRRWLDRLGESKYLMALKNLCDLGIVDPYPPLCDIKGSYTAQFEHTILCAQPVKKLSAEEMTIKT

SEQ ID NO: 1596 - protein, 480 aa, Homo sapiens; identical to SEQ ID NO: 1595

SEQ ID NO: 1597 - protein, 196 aa, Homo sapiens
MAAIRKKLVVVGDGACGKTCLLIVFSKDEFPEVYVPTVFENYVADIEVDGKQVELALWDTAGQEDYDRLRPLSYPDTDVILMCFSVDSPDSLENIPEKWVPEVKHFCPNVPIILVANKKDLRSDEHVRTELARMKQEPVRTDDGRAMAVRIQAYDYLECSAKTKEGVREVFETATRAALQKRYGSQNGCINCCKVL

SEQ ID NO: 1598 - protein, 356 aa, Homo sapiens
MNAARTGYRVFSANSTAACTELAKRITERLGAELGKSVVYQETNGETRVEIKESVRGQDIFIIQTIPRDVNTAVMELLIMAYALKTACARNIIGVIPYFPYSKQSKMRKRGSIVCKLLASMLAKAGLTHIITMDLHQKEIQGFFCFPVDNLRASPFLLQYIQEEIPNYRNAVIVAKSPDAAKRAQSYAERLRLGLAVIHGEAQCTELDMDDGRHSPPMVKNATVHPGLELPLMMAKEKPPITVVGDVGGRIAIIVDDIIDDVESFVAAAETLKERGAYKIYVMATHGILSAEAPRLIEESPIDEVVVTNTVPHELQKLQCPKIKTVDISLILSEAIRRIHNGESMAYLFRNITVDD

SEQ ID NO: 1599 - protein, 655 aa, Homo sapiens
MDPVRQIQCDREGKRFPFLSAPPASTSSPDRAMEGYHKPDQQKLQALKDTANRLRISSIQATTAAGSGHPTSCCSAAEIMAVLFFHTMRYKALDPRNPHNDRFVLSKGHAAPILYAVWAEAGFLPEAELLNLRKISSDLDGHPVPKQAFTDVATGSLGQGLGAACGMAYTGKYFDKASYRVYCMLGDGEVSEGSVWEAMAFAGIYKLDNLVAIFDINRLGQSDPAPLQHQVDVYQKRCEAFGWHAIIVDGHSVEELCKAFGQAKHQPTAIIAKTFKGRGITGIEDKEAWHGKPLPKNMAEQIIQEIYSQVQSKKKILATPPQEDAPSVDIANIRMPTPPNYKVGDKIATRKAYGLALAKLGHASDRIIALDGDTKNSTFSELFKKEHPDRFIECYIAEQNMVSIAVGCATRDRTVPFCSTFAAFFTRAFDQIRMAAISESNINLCGSHCGVSIGEDGPSQMALEDLAMFRSVPMSTVFYPSDGVATEKAVELAANTKGICFIRTSRPENAIIYSNNEDFQVGQAKVVLKSKDDQVTVIGAGVTLHEALAAAEMLKKEKIGVRVLDPFTIKPLDKKLILDCARATKGRILTVEDHYYEGGIGEAVSAVVVGEPGVTVTRLAVSQVPRSGKPAELLKMFGIDKDAIVQAVKGLVTKG

SEQ ID NO: 1600 - protein, 655 aa, Homo sapiens; identical to SEQ ID NO: 1599

SEQ ID NO: 1601 - protein, 327 aa, Homo sapiens
MATAMTVSSKLLGLLMQQLRGTRQLYFNVSLRSLSSSAQEASKRIPEEVSDHNYESIQVTSAQKHVLHVQLNRPEKRNAMNRAFWRELVECFQKISKDSDCRAVVVSGAGKMFTSGIDLMDMASDILQPPGDDVARIAWYLRDLISRYQKTFTVIEKCPKPVITAIHGGCIGGGVDLISACDIRYCTQDAFFQVKEVDVGLAADVGTLQRLPKVIGNRSLVNELTFTARKMMADEALDSGLVSRVFPDKDVMLNAAFALAADISSKSPVAVQGSKINLIYSRDHSVDESLDYMATWNMSMLQTQDIIKSVQAAMEKKDSKSITFSKL

SEQ ID NO: 1602 - protein, 544 aa, Homo sapiens
MIGIGGLLLAAGAFVLTLPHFLSEPYQYTSTTDGNRSSFQTDLCQKHFGALPPSKCHSTVPDTHKETSSLWGLMVVAQLLAGIGTVPIQPFGISYVDDFAEPTNSPLYISILFAIAVFGPAFGYLLGSVMLRIFVDYGRVDTATVNLSPGDPRWIGAWWLGLLISSGFLIVTSLPFFFFPRAMSRGAERSVTAEETMQTEEDKSRGSLMDFIKRFPRIFLRLLMNPLFMLVVLSQCTFSSVIAGLSTFLNKFLEKQYGATAAYANFLIGAVNLPAAALGMLFGGILMKRFVFPLQTIPRVAATIITISMILCVPLFFMGCSTSAVAEVYPPSTSSSIHPQQPPACRRDCSCPDSFFHPVCGDNGVEYVSPCHAGCSSTNTSSEASKEPIYLNCSCVSGGSASQDRLMPHVLRALLLPSIFLISFAALIACISHNPLYMMVLRVVNQDEKSFAIGVQFLLMRLLAWLPAPSLYGLLIDSSCVRWNYLCSGRRGACAYYDNDALRNRYLGLQMVYKALGTLLLFFISWRMKKNREYSLQENTSGLI

SEQ ID NO: 1603 - protein, 544 aa, Homo sapiens; identical to SEQ ID NO: 1602

SEQ ID NO: 1604 - protein, 128 aa, Homo sapiens
MAGGKAGKDSGKAKTKAVSRSQRAGLQFPVGRIHRHLKSRTTSHGRVGATAAVYSAAILEYLTAEVLELAGNASKDLKVKRITPRHLQLAIRGDEELDSLIKATIAGGGVIPHIHKSLIGKKGQQKTV

SEQ ID NO: 1605 - protein, 137 aa, Homo sapiens
MSAHLQWMVVRNCSSFLIKRNKQTYSTEPNNLKARNSFRYNGLIHRKTVGVEAWPDGKGVVVVMKRRSGQRKPATSYVRTTINKNARATLSSIRHMIRKNKYRPDLRMAAIRRASAILRSQKPVVVKRKRTRPTKSS

SEQ ID NO: 1606 - protein, 244 aa, Homo sapiens
MSLFTSFLLLCVLTAVYAETLTEGAQSSCPVIACSSPAWNGFPGKDGHDGAKGEKGEPGQGLRGLQGPPGKVGPAGPPGNPGSKGATGPKGDRGESVEFDTTNIDLEIAALRSELRAMRKWVLLSMSENVGKKYFMSSVRRMPLNRAKALCSELQGTVATPRNAEENRAIQNVAKDVAFLGITDQRTENVFEDLTGNRVRYTNWNEGEPNNVGSGENCVVLLTNGKWNDVPCSDSFLVVCEFSD

SEQ ID NO: 1607 - protein, 533 aa, Homo sapiens
MRLDRRALYALVLLLACASLGLLYASTRDAPGLPNPLALWSPPQGPPRLDLLDLATEPRYAHIPVRIKEQVVGLLAQNNCSCESSGGRFALPFLRQVRAIDFTKAFDAEELRAVSISREQEYQAFLARSRSLADQLLIAPANSPLQYPLQGVEVQPLRSILVPGLSLQEASVQEIYQVNLIASLGTWDVAGEVTGVTLTGEGQSDLTLASPILDKLNRQLQLVTYSSRSYQANTADTVRFSTKGHEVAFTILIRHPPNPRLYPPSSLPQGAQYNISALVTVATKTFLRYDRLRALIASIRRFYPTVTIVIADDSDKPERISDPHVEHYFMPFGKGWFAGRNLAVSQVTTKYVLWVDDDFVFTARTRLEKLVDVLERTPLDLVGGAVREISGYATTYRQLLSVEPGAPGFGNCLRQKQGFHHELAGFPNCVVTDGVVNFFLARTDKVRQVGFDPRLNRVAHLEFFLDGLGSLRVGSCSDVVVDHASKVKLPWTSKDPGAELYARYRYPGSLDQSQVAKHRLLFFKHRLQCMTAE

SEQ ID NO: 1608 - protein, 125 aa, Homo sapiens
MPSEKTFKQRRSFEQRVEDVRLIREQHPTKIPVIIERYKGEKQLPVLDKTKFLVPDHVNMSELIKIIRRRLQLNANQAFFLLVNGHSMVSVSTPISEVYESERDEDGFLYMVYASQETFGTALAV

SEQ ID NO: 1609 - protein, 704 aa, Homo sapiens
MADTGLRRVVPSDLYPLVLGFLRDNQLSEVASKFAKATGATQQDANASSLLDIYSFWLKSTKAPKVKLQSNGPVAKKAKKETSSSDSSEDSSEEEDKAQVPTQKAAAPAKRASLPQHAGKAAAKASESSSSEESSEEEEEKDKKKKPVQQKAVKPQAKAVRPPPKKAESSESESDSSSEDEAPQTQKPKAAATAAKAPTKAQTKAPAKPGPPAKAQPKAANGKAGSSSSSSSSSSSDDSEEEKKAAAPLKKTAPKKQVVAKAPVKVTAAPTQKSSSSEDSSSEEEEEQKKPMKKKAGPYSSVPPPSVSLSKKSVGAQSPKKAAAQTQPADSSADSSEESDSSSEEEKKTPAKTVVSKTPAKPAPVKKKAESSSDSSDSDSSEDEAPAKPVSATKSPLSKPAVTPKPPAAKAVATPKQPAGSGQKPQSRKADSSSSEEESSSSEEEATKKSVTTPKARVTAKAAPSLPAKQAPRAGGDSSSDSESSSSEEEKKTPPKPPAKKKAAGAAVPKPTPVKKAAAESSSSSSSSEDSSEEEKKKPKSKATPKPQAGKANGVPASQNGKAGKESEEEEEDTEQNKKAAGTKPGSGKKRKHNETADEAATPQSKKVKLQTPNTFPKRKKGEKRASSPFRRVREEEIEVDSRVADNSFDAKRGAAGDWGERANQVLKFTKGKSFRHEKTKKKRGSYRGGSISVQVNSVKFDSE

SEQ ID NO: 1610 - protein, 295 aa, Homo sapiens
MPSEKDGAKKSLMQRLALKSRIAKETLSEFLGTFIMIVLGCSSIAQAVLSRERFGGIITINIGFASAVVMALYVTFGISGGHINPAVSFAMCAFGRMEWFKFPFYVGAQFLGAFVGAATVFGIYYDGLMAFAGGKLLVVGENATAFIFATYPAPFISTPGAFVDQVVSTMFLLLIVFAMFDSRNLGVPRGLEPVVIGLLIIVLSCSLGLNSGCAMNPARDLSPRLFTALAGWGFEVFTVGNNFWWIPVVGPMIGAFLGGLIYILFIQMHHSKLDPDMKAEPSENNLEKHELSVIM

SEQ ID NO: 1611 - protein, 165 aa, Homo sapiens
MTLEEFSAAEQKIERMDTVGDALEEVLSKARSQRTITVGVYEAAKLLNVDPDNVVLCLLAADEDDDRDVALQIHFTLIRAFCCENDINILRVSNPGRLAELLLLENDKSPAESGGLAQTPDLHCVLVTNPHSSQWKDPALSQLICFCRESRYMDQWVPVINLPER

SEQ ID NO: 1612 - protein, 165 aa, Homo sapiens; identical to SEQ ID NO: 1611

SEQ ID NO: 1613 - protein, 165 aa, Homo sapiens; identical to SEQ ID NO: 1611

SEQ ID NO: 1614 - protein, 118 aa, Homo sapiens
MPFVELETNLPASRIPAGLENRLCAATATILDKPEDRVSVTIRPGMTLLMNKSTEPCAHLLISSIGVVGTAEQNRSHSSSFFKFLTEELSLDQDRIIIRFFPLEPWQIGKKGTVMTFL

SEQ ID NO: 1615 - protein, 118 aa, Homo sapiens; identical to SEQ ID NO: 1614

SEQ ID NO: 1616 - protein, 579 aa, Homo sapiens
MVLSEVWTTLSGVSGVCLACSLLSAAVVLRWTGRQKARGAATRARQKQRASLETMDKAVQRFRLQNPDLDSEALLTLPLLQLVQKLQSGELSPEAVFFTYLGKAWEVNKGTNCVTSYLTDCETQLSQAPRQGLLYGVPVSLKECFSYKGHDSTLGLSLNEGMPSESDCVVVQVLKLQGAVPFVHTNVPQSMLSFDCSNPLFGQTMNPWKSSKSPGGSSGGEGALIGSGGSPLGLGTDIGGSIRFPSAFCGICGLKPTGNRLSKSGLKGCVYGQTAVQLSLGPMARDVESLALCLKALLCEHLFTLDPTVPPLPFREEVYRSSRPLRVGYYETDNYTMPSPAMRRALIETKQRLEAAGHTLIPFLPNNIPYALEVLSAGGLFSDGGRSFLQNFKGDFVDPCLGDLILILRLPSWFKRLLSLLLKPLFPRLAAFLNSMRPRSAEKLWKLQHEIEMYRQSVIAQWKAMNLDVLLTPMLGPALDLNTPGRATGAISYTVLYNCLDFPAGVVPVTTVTAEDDAQMELYKGYFGDIWDIILKKAMKNSVGLPVAVQCVALPWQEELCLRFMREVEQLMTPQKQPS

SEQ ID NO: 1617 - protein, 195 aa, Homo sapiens
MGSRASTLLRDEELEEIKKETGFSHSQITRLYSRFTSLDKGENGTLSREDFQRIPELAINPLGDRIINAFFSEGEDQVNFRGFMRTLAHFRPIEDNEKSKDVNGPEPLNSRSNKLHFAFRLYDLDKDDKISRDELLQVLRMMVGVNISDEQLGSIADRTIQEADQDGDSAISFTEFVKVLEKVDVEQKMSIRFLH

SEQ ID NO: 1618 - protein, 317 aa, Homo sapiens
MPKRGKRAAAEDGEEPKSEPETKKSKGAAKKTEKEAAGEGPVLYEDPPDQKTSASGKSATLKICSWNVDGLRAWIKKKGLDWVKEEAPDILCLQETKCSENKLPAELQELPGLTHQYWSAPSDKEGYSGVGLLSRQCPLKVSYGIGEEEHDQEGRVIVAEFESFILVTAYVPNAGRGLVRLEYRQRWDEAFRKFLKDLASRKPLVLCGDLNVAHEEIDLRNPKGNKKNAGFTPQERQGFGEMLQAVPLADSFRHLYPNTAYAYTFWTYMMNARSKNVGWRLDYFLLSHSLLPALCDSKIRSKALGSDHCPITLYLAL

SEQ ID NO: 1619 - protein, 180 aa, Homo sapiens
MGLTISSLFSRLFGKKQMRILMVGLDAAGKTTILYKLKLGEIVTTIPTIGFNVETVEYKNICFTVWDVGGQDKIRPLWRHYFQNTQGLIFVVDSNDRERIQEGAAVLQKMLLEDELQDAVLLLFANKQDLPNAMAISEMTDKLGLQSLRNRTWYVQATCATQGTGLYEGLDWLSNELSKR

SEQ ID NO: 1620 - protein, 646 aa, Homo sapiens
MSKGPAVGIDLGTTYSCVGVFQHGKVEIIANDQGNRTTPSYVAFTDTERLIGDAAKNQVAMNPTNTVFDAKRLIGRRFDDAVVQSDMKHWPFMVVNDAGRPKVQVEYKGETKSFYPEEVSSMVLTKMKEIAEAYLGKTVTNAVVTVPAYFNDSQRQATKDAGTIAGLNVLRIINEPTAAAIAYGLDKKVGAERNVLIFDLGGGTFDVSILTIEDGIFEVKSTAGDTHLGGEDFDNRMVNHFIAEFKRKHKKDISENKRAVRRLRTACERAKRTLSSSTQASIEIDSLYEGIDFYTSITRARFEELNADLFRGTLDPVEKALRDAKLDKSQIHDIVLVGGSTRIPKIQKLLQDFFNGKELNKSINPDEAVAYGAAVQAAILSGDKSENVQDLLLLDVTPLSLGIETAGGVMTVLIKRNTTIPTKQTQTFTTYSDNQPGVLIQVYEGERAMTKDNNLLGKFELTGIPPAPRGVPQIEVTFDIDANGILNVSAVDKSTGKENKITITNDKGRLSKEDIERMVQEAEKYKAEDEKQRDKVSSKNSLESYAFNMKATVEDEKLQGKINDEDKQKILDKCNEIISWLDKNQTAEKEEFEHQQKELEKVCNPIITKLYQSAGGMPGGMPGGFPGGGAPPSGGASSGPTIEEVD

SEQ ID NO: 1621 - protein, 646 aa, Homo sapiens; identical to SEQ ID NO: 1620

SEQ ID NO: 1622 - protein, 353 aa, Homo sapiens
MAAAEAANCIMEVSCGQAESSEKPNAEDMTSKDYYFDSYAHFGIHEEMLKDEVRTLTYRNSMFHNRHLFKDKVVLDVGSGTGILCMFAAKAGARKVIGIECSSISDYAVKIVKANKLDHVVTIIKGKVEEVELPVEKVDIIISEWMGYCLFYESMLNTVLHARDKWLAPDGLIFPDRATLYVTAIEDRQYKDYKIHWWENVYGFDMSCIKDVAIKEPLVDVVDPKQLVTNACLIKEVDIYTVKVEDLTFTSPFCLQVKRNDYVHALVAYFNIEFTRCHKRTGFSTSPESPYTHWKQTVFYMEDYLTVKTGEEIFGTIGMRPNAKNNRDLDFTIDLDFKGQLCELSCSTDYRMR

SEQ ID NO: 1623 - protein, 381 aa, Homo sapiens
MNPFSSESAWLCLTATAVLGGMLLCKAWSSGQLRSQVVCLAGLWGGACLLSLSLLCSLFLLSVSCFFLLYVSSSDQDLLPVDQKAVLVTGADSGFGHALAKHLDKLGFTVFAGVLDKEGPGAEELRKNCSERLSVLQMDVTKPEQIKDVHSEVAEKIQDKGLWAVVNNAGVLHFPIDGELIPMTVYRKCMAVNFFGAVEVTKVFLPLLRKSKGRLVNVSSMGAMIPFQMVAAYASTKAAISMFSAVIRQELAKWGVKVVTIHPGGFQTNIVGSQDSWDKMEKEILDHFSKEIQENYGQEYVHTQKLALPVMREMSNPDITPVLRDIQHAICAKNPSSFYCSGRMTYLWICFAAYSPISLLDYILKNYFTPKLMPRALRTAS

SEQ ID NO: 1624 - protein, 735 aa, Homo sapiens
MASPLRFDGRVVLVTGAGGGLGRAYALAFAERGALVVVNDLGGDFKGVGKGSSAADKVVEEIRRRGGKAVANYDSGEAGEKLVKTALDTFGRIDVVVNNAGILRDRSFSRISDEDWDIIQRVHLRGSFQVTRAAWDHMKKQNYGRIIMTASASGIYSNFGQANYSAAKLGLLGLANTLVIEGRKNNIHCNTIAPNAGSRMTETVMPEDLVEALKPEYVAPLVLWLCHESCEENGGLFEVGAGWIGKLRWERTLGAIVRKRNQPMTPEAVRDNWVKICDFSNASKPKSIQESTGGIIEVLHKIDSEGISQNHTGQVASADASGFAGVVGHKLPSFSSSYTELQCIMYALGVGASVKNPKDLKFVYEGSADFSCLPTFGVIVAQKSLTSGGLAEVPGLSINFAKVLHGEQYLELYKPLPRSGELKCEAVIADILDKGSGIVIVMDVYSYSGKELICYNQFSVFVVGSGGFGGKRTSEKLKAAVAVPDRPPDAVLRDTTSLNQAALYRLSGDSNPLHIDPSFASIAGFEKPILHGLCTFGFSARHVLQQFADNDVSRFKAIKVRFAKPVYPGQTLQTEMWKEGNRIHFQTKVQETGDIVISNAYVDLVPTSGVSAQTPSEGGALQSALVFGEIGRRLKDVGREVVKKVNAVFEWHITKNGNVAAKWTIDLKNGSGEVYQGPAKGSADTTITISDEDFMEVVLGKLNPQNAFFSGRLKARGNIMLSQKLQMILKDYAKL

SEQ ID NO: 1625 - protein, 735 aa, Homo sapiens; identical to SEQ ID NO: 1624

SEQ ID NO: 1626 - protein, 217 aa, Homo sapiens
MAARCVRLARRSLPALALSFRPSPRLLCTATKQKNNGQNLEEDLGHCEPKTDPSSADKTLLEEKVKLEEQLKETMEKYKRALADTENLRQRSQKLVEEAKLYGIQGFCKDLLEVADILEKATQSVPKEEVSNNNPHLKSLYEGLVMTEVQIQKVFTKHGLLRLDPIGAKFDPYEHEALFHTPVEGKEPGTVALVSKVGYKLHGRTLRPALVGVVKDA

SEQ ID NO: 1627 - protein, 392 aa, Homo sapiens
MGSHQLLVPPPEALSKPLSIPKRLLLGPGPSNLAPRVLAAGSLRMIGHMQKEMFQIMDEIKQGIQYVFQTRNPLTLVVSGSGHCAMETALFNLLEPGDSFLVGTNGIWGIRAAEIAERIGARVHQMIKKPGEHYTLQEVEEGLAQHKPVLLFLTHGESSTGVLQPLDGFGELCHRYQCLLLVDSVASLGGVPIYMDQQGIDILYSGSQKVLNAPPGISLISFNDKAKSKVYSRKTKPVSFYTDITYLSKLWGCEGKTRVIHHTLPVISLYCLRESLALISEQGLENSWRRHREATAHLHKCLRELGLKFFVKDPEIRLPTITTVTVPAGYNWRDIVSYVLDHFNIEISGGLGPSEDKVLRIGLLGYNATTENADRVAEALREALQHCPKNKL

SEQ ID NO: 1628 - protein, 392 aa, Homo sapiens; identical to SEQ ID NO: 1627

SEQ ID NO: 1629 - protein, 392 aa, Homo sapiens; identical to SEQ ID NO: 1627

SEQ ID NO: 1630 - protein, 66 aa, Homo sapiens
MVAKQRIRMANEKHSKNITQRGNVAKTSRNAPEEKASVGPWLLALFIFVVCGSAIFQIIQSIRMGM

SEQ ID NO: 1631 - protein, 96 aa, Homo sapiens
MVSATRSLLCAALPVLATSRQATGAPVANELRCQCLQTVAGIHFKNIQSLKVMPPGPHCTQTEVIATLKNGREACLDPEAPMVQKIVQKMLKGVPK

SEQ ID NO: 1632 - protein, 407 aa, Homo sapiens [sequence omitted]

SEQ ID NO: 1633 - protein, 407 aa, Homo sapiens
MRWFRALLKNASLAGAPKYIEHFSKFSPSPLSMKQFLDFGSSNACEKTSFTFLRQELPVRLANIMKEINLLPDRVLSTPSVQLVQSWYVQSLLDIMEFLDKDPEDHRTLSQFTDALVTIRNRHNDVVPTMAQGVLEYKDTYGDDPVSNQNIQYFLDRFYLSRISIRMLINQHTLIFDGSTNPAHPKHIGSIDPNCSVSDVVKDAYDMAKLLCDKYYMASPDLEIQEVNATNATQPIHMVYVPSHLYHMLFELFKNAMRATVESHESSLTLPPIKIMVALGEEDLSIKMSDRGGGVPLRKIERLFSYMYSTAPTPQPGTGGTPLAGFGYGLPISRLYAKYFQGDLQLFSMEGFGTDAVIYLKALSTDSVERLPVYNKSAWRHYQTIQEAGDWCVPSTEPKNTSTYRVS

SEQ ID NO: 1634 - protein, 407 aa, Homo sapiens; identical to SEQ ID NO: 1633

SEQ ID NO: 1635 - protein, 359 aa, Homo sapiens [sequence omitted]

SEQ ID NO: 1636 - protein, 359 aa, Homo sapiens [sequence omitted]

SEQ ID NO: 1637 - protein, 391 aa, Homo sapiens
MEDSQSDMSIELPLSQETFSCLWKLLPPDDILPTTATGSPNSMEDLFLPQDVAELLEGPEEALQVSAPAAQEPGTEAPAPVAPASATPWPLSSSVPSQKTYQGNYGFHLGFLQSGTAKSVMCTYSISLNKLFCQLAKTCPVQLWVTSTPPPGTRVRAMAIYKKSQHMTEVVRRWPHHERCSDGDGLAPPQHLIRVEGNPYAEYLDDRQTFRHSVVVPYEPPEVGSDYTTIHYKYMCNSSCMGGMNRRPILTIITLEDSSGNLLGRDSFEVRVCACPGRDRRTEEENFRKKEEHCPELPPGSAKRALPTSTSSSPQQKKKPLDGEYFTLKIRGRERFEMFRELNEALELKDARAAEESGDSRAHSSYPKTKKGQSTSRHKKPMIKKVGPDSD

SEQ ID NO: 1638 - protein, 325 aa, Homo sapiens
MTASSVLLHTGQKMPLIGLGTWKSEPGQVKAAIKYALSVGYRHIDCASVYGNETEIGEALKESVGAGKAVPREELFVTSKLWNTKHHPEDVEPAVRKTLADLQLEYLDLYLMHWPYAFERGDNPFPKNADGTVKYDSTHYKETWKALEALVAKGLVKALGLSNFSSRQIDDVLSVASVRPAVLQVECHPYLAQNELIAHCQARGLEVTAYSPLGSSDRAWRHPDEPVLLEEPVVLALAEKHGRSPAQILLRWQVQRKVICIPKSITPSRILQNIQVFDFTFSPEEMKQLDALNKNWRYIVPMITVDGKRVPRDAGHPLYPFNDPY

SEQ ID NO: 1639 - protein, 500 aa, Homo sapiens
MAFLLTTRRLVCSSQKNLHLFTPGSRYISQAAAKVDFEFDYDGPLMKTEVPGPRSQELMKQLNTIQNAEAVHFFCNYEESRGNYLVDVDGNRMLDLYSQISSVPIGYNHPALAKLVQQPQNASTFINRPALGILPPENFVDKLRESLMSVAPKGMCQLITMACGSCSNENAFKTIFMWYRSKERGQRGFSKEELETCMVNQSPGCPDYSILSFMGAFHGRTMGCLATTHSKAIHKIDIPSFDWPIAPFPRLKYPLEEFVTDNQQEEARCLEEVEDLIVKYRKKKRTVAGIIVEPIQSEGGDNHASDDFFRKLRDIARKHGCAFLVDEVQTGGGCTGKFWAHEHWGLDDPADVMSFSKKMMTGGFFHKEEFRPSAPYRIFNTWLGDPSKNLLLAEVINIIKREDLLNNVAHAGKTLLTGLLDLQAQYPQFVSRVRGRGTFCSFDTPDKAIRNKLILIARNKGVVLGGCGDKSIRFRPTLVFRDHHAHLFLNIFSGILADFK

SEQ ID NO: 1640 - protein, 500 aa, Homo sapiens; identical to SEQ ID NO: 1639

SEQ ID NO: 1641 - protein, 333 aa, Homo sapiens
MEAAHFFEGTEKLLEVWFSRQQSDASQGSGDLRTIPRSEWDVLLKDVQCSIISVTKTDKQEAYVLSESSMFVSKRRFILKTCGTTLLLKALVPLLKLARDYSGFDSIQSFFYSRKNFMKPSHQGYPHRNFQEEIEFLNAIFPNGAGYCMGRMNSDCWYLYTLDLPESRVINQPDQTLEILMSELDPAVMDQFYMKDGVTAKDVTRESGIRDLIPGSVIDATLFNPCGYSMNGMKSDGTYWTIHITPEPEFSYVSFETNLSQTSYDDLIRKVVEVFKPGKFVTTLFVNQSSKCRTVLSSPQKIDGFKRLDCQSAMFNDYNFVFTSFAKKQQQQS

SEQ ID NO: 1642 - protein, 965 aa, Homo sapiens
MAKGFYISKTLGILGILLGVAAVCTIIALSVVYAQEKNRNAENSAIAPTLPGSTSATTSTTNPAIDESKPWNQYRLPKTLIPDSYQVTLRPYLTPNEQGLYIFKGSSTVRFTCNETTNVIIIHSKKLNYTNKGNHRVALRALGDTPAPNIDTTELVERTEYLVVHLQGSLVKGHQYEMDSEFQGELADDLAGFYRSEYMEGGNKKVVATTQMQAADARKSFPCFDEPAMKASFNITLIHPNNLTALSNMLPKDSRTLQEDPSWNVTEFHPTPKMSTYLLAYIVSEFKYVEAVSPNRVQIRIWARPSAIDEGHGDYALQVTGPILNFFAQHYNTAYPLEKSDQIALPDFNAGAMENWGLVTYRESALVFDPQSSSISNKERVVTVIAHELAHQWFGNLVTVDWWNDLWLNEGFASYVEFLGADYAEPTWNLKDLIVLNDVYRVMAVDALASSHPLSSPANEVNTPAQISELFDSITYSKGASVLRMLSSFLTEDLFKKGLSSYLHTFQYSNTIYLDLWEHLQQAVDSQTAIKLPASVSTIMDRWILQMGFPVITVNTSTGEIYQEHFLLDPTSKPTRPSDFNYLWIVPIPYLKNGKEDHYWLETEKNQSAEFQTSSNEWLLLNINVTGYYQVNYDENNWRKIQNQLQTDLSVIPVINRAQIIHDSFNLASAGKLSITLPLSNTLFLASETEYMPWEAALSSLNYFKLMFDRSEVYGPMKRYLKKQVTPLFAYFKIKTNNWLDRPPTLMEQYNEINAISTACSSGLEECRDLVVGLYSQWMNNSDNNPIHPNLRSTVYCNAIAFGGEEEWNFAWEQFRKATLVNEADKLRSALACSNEVWILNRYLSYTLNPDYIRKQDATSTIVSIANNVVGQTLVWDFVRSNWKKLFEDYGGGSFSFANLIQGVTRRFSSEFELQQLEQFKEDNSATGFGSGTRALEQALEKTKANIKWVKENKDVVLKWFTENS

SEQ ID NO: 1643 - protein, 1502 aa, Homo sapiens
MNGEHSMATPGESCAGLRVWNQTEQEPVAYHLLNLCFLRAAGSWVPPMYLWVLGPIYLLYIHRHGCCYLRMSRLFKIKMVLGFALILLYTFNAAVPLWRIHRGMPQAPELLIHPTVWLTTMSFATFLIHMERKKGVRASGLLFGYWLLCCLVPAIDTVQQASAGSFRQEPLHHLATYLCLSLVVAELVLSCLVDQPPFFSEDSKPLNPCPEAEASFPSKAMFWWASGLLWKGYRKLLGPKDLWSLERENSSEELVSQLEREWRRNFSELPGHKGHSGMGTPETEAFLQPERSQRGPLLRAIWRVFRSTFLLGTLSLVISDAFRFAVPKLLSLFLEFMGDLESSAWTGWLLAVLMFLSACLQTLFEQQYMYRVKVLQMRLRTAITGLVYRKVLVLSSGSRKSSAAGDVVNLVSVDVQRLVESILHLNGLWLLFLWIIVCFVYLWQLLGPSALTAVAVFLSLLPLNFFITKKRSFHQEEQMRQKASRARLTSSMLRTVRTIKSHGWECAFLERLLHIRGQELGALKTSAFLFSVSLVSFQVSTFLVALVVFAVHTLVAEDNAMDAEKAFVTLTVLSILNKAQAFLPFSVHCLVQARVSFDRLAAFLCLEEVDPNGMVLSPSRCSSKDRISIHNGTFAWSQESPPCLHGINLTVPQGCLLAVVGPVGAGKSSLLSALLGELLKVEGSVSIEGSVAYVPQEAWVQNTSVVENVCFRQELDLPWLQEVLEACALGSDVASFPAGVHTPVGEQGMNLSGGQKQRLSLARAVYRRAAVYLMDDPLAALDAHVSQEVFKQVIGPSGLLQGTTRILVTHTLHVLPQADQILVLANGTIAEMGSYQDLLHRNGALVGLLDGARQPAGEGEGEAHAAATSDDLGGFSGGGTPTRRPERPRPSDAAPVKGSTSEAQMEPSLDDVEVTGLTAGEDSVQYGRVKSATYLSYLRAVGTPLCTYTLFLFLCQQVASFCQGYWLSLWADDPVVDGKQMHSALRGSIFGLLGCLQAIGLFASMAAVFLGGARASCLLFRSLLWDVARSPIGFFERTPVGNLLNRFSKETDIVDVDIPDKMRTLLTYAFGLLEVGLAVSMATPLAIVAILPLMLLYAGFQSLYVATCCQLRRLESASYSSVCSHLAETFQGSQVVRAFQAQGPFTAQHDALMDENQRISFPRLVADRWLAANLELLGNGLVFVAATCAVLSKAHLSAGLAGFSVSAALQVTQTLQWVVRSWTDLENSMVAVERVQDYVHTPKEAPWRLPSSAAQPLWPCGGQIEFRDFGLRHRPELPMAVQGVSLKIHAGEKVGIVGRTGAGKSSLTWGLLRLQEATEGGIWIDGVPITDMGLHTLRSRITIIPQDPVLFPGSLRMNLDLLQENTDEGIWAALETVQLKAFVTSLPGQLQYECSGQGDDLSVGQKQLLCLARALLRKTQILILDEATASVDPGTEIQMQAALERWFAQCTVLLIAHRLRSVMNCARVLVMDEGQVAESGSPAQLLAQKGLFYRLAQESGLA

SEQ ID NO: 1644 - protein, 355 aa, Homo sapiens
MGCTVSAEDKAAAERSKMIDKNLREDGEKAAREVKLLLLGAGESGKSTIVKQMKIIHEDGYSEEECRQYRAVVYSNTIQSIMAIVKAMGNLQIDFADPQRADDARQLFALSCAAEEQGMLPEDLSGVIRRLWADHGVQACFGRSREYQLNDSAAYYLNDLERIAQSDYIPTQQDVLRTRVKTTGIVETHFTFKDLHFKMFDVGGQRSERKKWIHCFEGVTAIIFCVALSAYDLVLAEDEEMNRMHESMKLFDSICNNKWFTDTSIILFLNKKDLFEEKITQSPLTICFPEYTGANKYDEAASYIQSKFEDLNKRKDTKEIYTHFTCATDTKNVQFVFDAVTDVIIKNNLKDCGLF

SEQ ID NO: 1645 - protein, 316 aa, Homo sapiens
MASTSRLDALPRVTCPNHPDAILVEDYRAGDMICPECGLVVGDRVIDVGSEWRTFSNDKATKDPSRVGDSQNPLLSDGDLSTMIGKGTGAASFDEFGNSKYQNRRTMSSSDRAMMNAFKEITTMADRINLPRNIVDRTNNLFKQVYEQKSLKGRANDAIASACLYIACRQEGVPRTFKEICAVSRISKKEIGRCFKLILKALETSVDLITTGDFMSRFCSNLCLPKQVQMAATHIARKAVELDLVPGRSPISVAAAAIYMASQASAEKRTQKEIGDIAGVADVTIRQSYRLIYPRAPDLFPSDFKFDTPVDKLPQL

SEQ ID NO: 1646 - protein, 115 aa, Homo sapiens
MPMFIVNTNVPRASVPEGFLSELTQQLAQATGKPAQYIAVHVVPDQLMTFSGTSDPCALCSLHSIGKIGGAQNRNYSKLLCGLLSDRLHISPDRVYINYYDMNAANVGWNGSTFA

SEQ ID NO: 1647 - protein, 710 aa, Homo sapiens
MLLAAGTRYAYRLCGRRAAAALQGRAGRSCARSVSTSWSPVGAAFNVKPQGHLWDLLGERRGLFGVPELSTPEGFQVAQEEALRKTEWLVERACSTPPGPQTVLIFDELSDCLCRVADLADFVKIGHPEQAFREAAQEACRSIGTMVEKLNTNVELYQSLQKLLDDKKLMDSLDAETRRVAELFMFDFEISGIHLDEEKRRRAVDLNVKILDLSSAFLMGTNFPIKIQKHLLPEHIQHHFARDGRHLVIDGLHAEASDDLVREAAYKIFLYPNADQLKCLEELLSSRDLLANLVGYLPFPTGPPGTIAQTPETVMQFLEKLSEKLCERTRKDFEMMQGMKTKLNPQNSELMPWDPPYYSGVIRAERYNIEPSLYCPFLSLGACMEGLNVLFNRLLGVTLYAEQPFKGEVWCIDVRKLAVVHESEGLLGYIYCDFFQRANKPQQDCHFTIRGGRLKEDGSYQLPVVVLMLNLPHASRDFPTLLTPGMMENLFHEMGHAMHSMLGRTRYQHVTGTRCPTDFAEVPSILMEYFSNDYRVVSQFAKHYQTGQPLPKAMVSRLCESKKVCAAAEMQLQVFYAALDQIYHGQHPLKKSTTDILMETQEQFYGLPYVPDTAWQLRFSHLVGYGAKYYSYLMSRAVASMVWKECFLQDPFNRAAGERYRREMLAHGGGKEPMLMIQGMLQKCPSIDDFVDALVSDLNLDFETFFMDSK

SEQ ID NO: 1648 - protein, 401 aa, Homo sapiens
MASEKPQDLMVTCTAPVNIAVIKYWGKRDEALILPINPSLSVTLHQDQLKTTTTAAISKDFTEDRIWLNGREEDVGQPRLQACLREIRRLARKRRSTGDGDALPLSLGYKVHVASVNNFPTAAGLASSAAGYACLAYTLARVYGVEGDLSEVARRGSGSACRSLYGGFVEWQMGEQADGKDSIARQIAPEWHWPQLRVLILVVSAEKKPTGSTVGMQTSVATSTLLKFRAESIVPERMKEMTRCIQEQDFQAFAQLTMKDSNQFHATCLDTFPPISYLNDTSRRIIQLVHRFNAHHGQTKVAYTFDAGPNAVIFTLEDTVAEFVAAVRHSFPPAANGDKFLKGLQVAPVLLSDELKTSLATEPSPGGVQYIIATQVGPGPQVLDDPHHHLLGPDGLPQRDL

SEQ ID NO: 1649 - protein, 217 aa, Homo sapiens
MSSKVSRDTLYEAVREVLHGNQRKRRKFLETVELQISLKNYDPQKDKRFSGTVRLKSTPRPKFSVCVLGDQQHCDEAKAVDIPHMDIEALKKLNKNKKLVKKLAKKYDAFLASESLIKQIPRILGPGLNKAGKFPSLLTHNENMVAKVDEVKSTIKFQMKKVLCLAVAVGHVKMTDDELVYNIHLAVNFLVSLLKKNWQNVRALYIKSTMGKPQRLY

SEQ ID NO: 1650 - protein, 97 aa, Homo sapiens [sequence omitted]

SEQ ID NO: 1651 - protein, 165 aa, Homo sapiens
MLMPKKNRIAIYELLFKEGVMVAKKDVHMPKHPELADKNVPNLHVMKAMQSLKSRGYVKEQFAWRHFYWYLTNEGIQYLRDYLHLPPEIVPATLRRSRPETGRPRPKGPEGERPARFTRGEADRDTYRRSAVPPGADKKAEAGAGSATEFQFRGGFGRGRGQPPQ

SEQ ID NO: 1652 - protein, 158 aa, Homo sapiens [sequence omitted]

SEQ ID NO: 1653 - protein, 83 aa, Homo sapiens
MQNDAGEFVDLYVPRKCSASNRIIAAKDHASIQMNVAEVDRSTGRFNGQFKTYGICGAIRRMGESDDSILRLAKADGIVSKNF

SEQ ID NO: 1654 - protein, 156 aa, Homo sapiens
MQIFVKTLTGKTITLEVEPSDTIENVKAKIQDKEGIPPDQQRLIFAGKQLEDGRTLSDYNIQKESTLHLVLRLRGGAKKRKKKSYTTPKKNKHKRKKVKLAVLKYYKVDENGKISRLRRECPSDECGAGVFMGSHFDRHYCGKCCLTYCFNKPEDK

SEQ ID NO: 1655 - protein, 95 aa, Homo sapiens
MPSQMEHAMETMMLTFHRFAGEKNYLTKEDLRVLMEREFPGFLENQKDPLAVDKIMKDLDQCRDGKVGFQSFLSLVAGLIIACNDYFVVHMKQKK

SEQ ID NO: 1656 - protein, 488 aa, Homo sapiens
MGTLIGLGAVLAYHDHRCRASQESPRIYSKEDVRSHNNLKTGVWVTLGSEVFDVTKFVDLHPGGQSKLMLAAGGPLEPFWALYAVHNQPHVRELLAEYKIGELNPEDRMSPPLEASDPYSNDPMRHPALRINSQRPFNAEPPPELLTESYITPNPIFFTRNHLPVPNLDPDTYRLHVVGAPGGQSLSLSLDDLHKFPKHEVTVTLQCAGNRRSEMNKVKEVKGLEWRTGAISTARWAGARLCDVLAQAGHRLRETEAHVCFEGLDSDPTGTAYGASIPLARAMDPQAEVLLAYEMNGQPLPRDHGFPVRVVVPGVVGARHVKWLGRVSVESEESYSHWQRRDYKGFSPSVDWDTVDFDLAPSIQELPIQSAITQPQDGTTVESGEVIIKGYAWSGGGRAVIRVDVSMDGGLTWQEAELEGEEQHPRKAWAWRIWQLKAHVPAEQKELNIICKAVDDSYNVQPDTVAPIWNLRGVLSNAWHRVHVQVVP

SEQ ID NO: 1657 - protein, 480 aa, Homo sapiens
MLNFGASLQQASEGKMELISEKSKEGAHPWDKAEQSDFEAVEALMSMSCDWKSHFKKYLENRPVTPVSDTSEEDSLLPGTPDLQTVPAFCLTPPYSPSDFEPSQGSNLTAPAPPTGHFRSLSDAAKPPSIAPFKEEEKSPLAAPPLPKAQATSVIRHTADAQLCNHQSCPVKAASILNYQDNSFRRRTHINVEATRKNIPCAAVSPNRPKPEPSTAANGAEKAGTAPYDFAVPSSETVICRSSQPAPTSPVQKSVLMSSPTVSTGGVPPLPVICQMVPLPANNSLVTTVVPSSPPSQPPAVCSPVLFMGTQVPKGTVMFVVPQPVVQSPKPPVVSPNGTRLSPIAPAPGFSPSAARVTPQIDSSRVRSHICSHPGCGKTYFKSSHLKAHVRTHTGEKPFSCSWKGCERRFARSDELSRHRRTHTGEKKFACPMCDRRFMRSDHLTKHARRHLSAKKLPNWQMEVSKLNDIALPPATASAQ

SEQ ID NO: 1658 - protein, 152 aa, Homo sapiens
MSTPARRRLMRDFKRLQEDPPVGVSGAPSENNIMQWNAVIFGPEGTPFEDGTFKLVIEFSEEYPNKPPTVRFLSKMFHPNVYADGSICLDILQNRWSPTYDVSSILTSIQSLLDEPNPNSPANSQAAQLYQENKREYEKRVSAIVEQSWNDS

SEQ ID NO: 1659 - protein, 466 aa, Homo sapiens
MSTRSVSSSSYRRMFGGSGTSSRPSSNRSYVTTSTRTYSLGSALRPSTSRSLYSSSPGGAYVTRSSAVRLRSSMPGVRLLQDSVDFSLADAINTEFKNTRTNEKVELQELNDRFANYIDKVRFLEQQNKILLAELEQLKGQGKSRLGDLYEEEMRELRRQVDQLTNDKARVEVERDNLAEDIMRLREKLQEEMLQREEAESTLQSFRQDVDNASLARLDLERKVESLQEEIAFLKKLHDEEIQELQAQIQEQHVQIDVDVSKPDLTAALRDVRQQYESVAAKNLQEAEEWYKSKFADLSEAANRNNDALRQAKQESNEYRRQVQSLTCEVDALKGTNESLERQMREMEENFALEAANYQDTIGRLQDEIQNMKEEMARHLREYQDLLNVKMALDIEIATYRKLLEGEESRISLPLPNFSSLNLRETNLESLPLVDTHSKRTLLIKTVETRDGQVINETSQHHDDLE

SEQ ID NO: 1660 - protein, 406 aa, Homo sapiens
MALDGPEQMELEEGKAGSGLRQYYLSKIEELQLIVNDKSQNLRRLQAQRNELNAKVRLLREELQLLQEQGSYVGEVVRAMDKKKVLVKVHPEGKFVVDVDKNIDINDVTPNCRVALRNDSYTLHKILPNKVDPLVSLMMVEKVPDSTYEMIGGLDKQIKEIKEVIELPVKHPELFEALGIAQPKGVLLYGPPGTGKTLLARAVAHHTDCTFIRVSGSELVQKFIGEGARMVRELFVMAREHAPSIIFMDEIDSIGSSRLEGGSGGDSEVQRTMLELLNQLDGFEATKNIKVIMATNRIDILDSALLRPGRIDRKIEFPPPNEEARLDILKIHSRKMNLTRGINLRKIAELMPGASGAEVKGVCTEAGMYALRERRVHVTQEDFEMAVAKVMQKDSEKNMSIKKLWK

SEQ ID NO: 1661 - protein, 218 aa, Homo sapiens
MPMTLGYWDIRGLAHAIRLLLEYTDSSYEEKRYTMGDAPDFDRSQWLNEKFKLGLDFPNLPYLIDGSHKITQSNAILRYLGRKHNLCGETEEERIRVDILENQLMDNRMVLARLCYNPDFEKLKPGYLEQLPGMMRLYSEFLGKRPWFAGDKITFVDFIAYDVLERNQVFEATCLDAFPNLKDFIARFEGLKKISDYMKSSRFLPRPLFTKMAIWGSK

SEQ ID NO: 1662 - protein, 331 aa, Homo sapiens; identical to SEQ ID NO: 1562

SEQ ID NO: 1663 - protein, 380 aa, Homo sapiens
MVLESTMVCVDNSEYMRNGDFLPTRLQAQQDAVNIVCHSKTRSNPENNVGLITLANDCEVLTTLTPDTGRILSKLHTVQPKGKITFCTGIRVAHLALKHRQGKNHKMRIIAFVGSPVEDNEKDLVKLAKRLKKEKVNVDIINFGEEEVNTEKLTAFVNTLNGKDGTGSHLVTVPPGPSLADALISSPILAGEGGAMLGLGASDFEFGVDPSADPELALALRVSMEEQRQRQEEEARRAAAASAAEAGIATPGTEGERDSDDALLKMTISQQEFGRAGLPDLSSMTEEEQIAYAMQMSLQGAEFGQAESGDIDASSAMDTSEPVKEEDDYDVMQDPEFLQSVLENLPGVDPNNEAIRNAMGSLASQATKDGKKDKKEEEKK

SEQ ID NO: 1664 - protein, 1432 aa, Homo sapiens
MVAAAAAAEATEARLRGYTTATAAPAGWKERQHRPCAATGAWRPWPRAGLCLPRVLSRALSPPPLLPLLPLLFSLLLLPLPREAEAAAVAAAVSGSAAAEAKECDRPCVNGGRCNPGTGQCVCPTGWVGEQCQHCGGRFRLTGSSGFVTDGPGNYKYKTKCTWLIEGQPNKIMRLRFNHFATECSWDHLYVYDGDSIYAPLIAAFSGLIVPERDGNETAPEVTVTSGYALLHFFSDAAYNLTGFNITYNFDMCPNNCSGRGECKSSNSSSTVECECSENWKGESCDIPHCTDNCGFPHRGICNASDTRGCSCFPHWQGPGCSIPVPANQSFWTREEYSDLKLPRASHKAVVNGNIMWVVGGYMFNHSDYSMVLAYDLASREWLSLNHSVNSVVVRYGHSLALHKDKIYMYGGKIDSTGNVTNELRVFHIHNESWVLLTPKAKDQYAVVGHSAHIVTLSSGRVVMLVIFGHCPLYGYISVVQEYDLEKNTWSILQTQGALVQGGYGHSSVYDHRTKALYVHGGYKAFSANKYRLADDLYRYHVDTQMWTILKDSRFFRYLHTAVIVSGTMLVFGGNTHNDTSMSHGAKCFSSDFMAYDIACDRWSVLPRPELHHDVNRFGHSAVLHNSTMYVFGGFNSLLLSDVLVFTSEQCDAHRSEAACVAAGPGIRCLWDTQSSRCTSWELATEEQAEKLKSECFSKRTLDHDRCDQHTDCYSCTANTNDCHWCNDHCVPVNHSCTEGQISIAKYDNCPKDNPMYYCNKKTSCRSCALDQNCQWEPRNQECIALPENICGIGWHLVGNSCLKITTAKENYDNAKLSCRNHNAFLASLTSQKKVEFVLKQLRLMQSSQSTSKLTLTPWVGLRKINVSYWCWEDMSPFTNSLLQWMPSEPSDAGFCGILSEPSTRGLKAATCINPLNGSVCERPANHSAKQCRTPCALRTACGECTSSSSECMWCSNMKQCVDSNAYVASFPFGQCMEWYTMSSCPPENCSGYCTCSHCLEQPGCGWCTDPSNTGKGKCIEGSYKGPVKMPSHASTGNVYPQPLLNSSMCLEDSRYNWSFIHCPACQCNGHSKCINQSICEKCEDLTTGKHCETCISGFYGDPTNGGKCQPCKCNGHASLCNTNTGKCFCTTKGVKGEECQLCEVENRYQGNPLKGTCYYTLLIDYQFTFSLSQEDDRYYTAINFVATPDEQNRDLDMFINASKNFNLNITWATSFPAGTQTGEEVPVVSKTNIKEYKDSFSNEKFDFRNHPNITFFVYVSNFTWPIKIQIAFSQHSNFMDLVQFFVTFFSCFLSLLLVAAVVWKIKQSCWASRRREQLLREMQQMASRPFASVNVALETDEEPPDLIGGSIKTVPKPIALEPCFGNKAAVLSVFVRLPRGLGGIPPPGQSGLAVASALVDISQQMPIVYKEKSGAVRNRKQQPPAQPGTCI

SEQ ID NO: 1665 - protein, 508 aa, Homo sapiens
MKFVLLLSLIGFCWAQYDPHTADGRTAIVHLFEWRWADIAKECERYLAPKGFGGVQVSPPNENIIINNPSRPWWERYQPISYKICSRSGNENEFKDMVTRCNNVGVRIYVDAVINHMCGSGNSAGTHSTCGSYFNPNNREFSAVPYSAWYFNDNKCNGEINNYNDANQVRNCRLSGLLDLALDKDYVRTKVADYMNNLIDIGVAGFRLDAAKHMWPGDIKAVLDKLHNLNTKWFSQGSRPFIFQEVIDLGGEAIKGSEYFGNGRVTEFKYGAKLGTVIRKWNGEKMSYLKNWGEGWGFVPTDRALVFVDNHDNQRGHGAGGASILTFWDARMYKMAVGFMLAHPYGFTRVMSSYRRTRNFQNGKDVNDWIGPPNNNGVTKEVTINPDTTCGNDWVCEHRWRQIRNMVAFRNVVNGQPFANWWDNGSNQVAFSRGNRGFIVFNNDDWALSSTLQTGLPAGTYCDVISGDKVNGNCTGLKVNVGSDGKAHFSISNSAEDPFIAIHADSKL

SEQ ID NO: 1666 - protein, 414 aa, Homo sapiens
MSRKIHGGSVVEMQGDEMTRIIWELIKEKLILPYVELDLHSYDLGIENRDATNDQVTKDAAEAIKKYNVGVKCATITPDEKRVEEFKLKQMWKSPNGTIRNILGGTVFREAIICKNIPRLVTGWVKPIIIGRHAYGDQYRATDFVVPGPGKVEITYTPKDGSQKVTYLVHDFEEGGGVAMGMYNQDKSIEDFAHSSFQMALSKGWPLYLSTKNTILKKYDGRFKDIFQEIYDKQYKSKFEAQKIWYEHRLIDDMVAQAMKSEGGFIWACKNYDGDVQSDSVAQGYGSLGMMTSVLICPDGKTVEAEAAHGTVTRHYRMYQKGQETSTNPIASIFAWSRGLAHRAKLDNNTELSFFANALEEVCIETIEAGFMTKDLAACIKGLPNVQRSDYLNTFEFMDKLGENLKAKLAQAKL

SEQ ID NO: 1667 - protein, 408 aa, Homo sapiens
MDGIGSALLSFPDCILGEDTLFHEDQDKGTQLDSLTLASINTDFAFSLYKKLALRNPHKNVVFSPLSISAALAVVSLGAKGSSMEEILEGLKFNLTETPETEIHRGFGHLLQRLSQPRDEIQISTGNALFIEKRLQVLAEFQEKAKALYQAEAFTADFQQSREAKKLINDYVSKQTQGKIQGLITNLAKKTSMVLVNYIYFKGKWKVPFDPRDTFQSEFYSGKRRSVKVPMMKLEDLTTPYVRDEELNCTVVELKYTGNASALFILPDQGKMQQVEASLQPETLRRWKDSLRPSMIDELYLPKFSISADYNLEDVLPELGIKEVFSTQADLSGITGDKDLMVFQVVHKAVLDVAETGTEAAAATGVKFVPMSAKLDPLIIAFDRPFLMIISDTETAIAPFLAKIFNPK

SEQ ID NO: 1668 - protein, 493 aa, Homo sapiens
MAVLGITIALLVWVATLLVISIWKKIYNSWNLPPGPFPLPILGNIFQLDLKDIPKSFTKLAKRFGPVFTLHLGSRRIVVLHGYKAVKEVLLNHKNEFSGRGDIPVFQEYKNKGIIFNNGPTWKDVRRFSLSILRDWGMGKQGNEARIQREAQFLVEELKKTKGQPFDPTFLIGCAPCNVIADILFNKRFDYNDKKCLRLMSLFNENFYLLSTPWIQLYNNFADYLRYLPGSHRKIMKNVSEIKQYTLEKAKEHLQSLDINCARDVTDCLLIEMEKEKHSQEPMYTMENVSVTLADLFFAGTETTSTTLRYGLLILMKYPEIEEKLHEEIDRVIGPSRVPAVRDRLDMPYMDAVVHEIQRFINLVPSNLPHEATRDTVFQGYVIPKGTVVIPTLDSLLYDSHEFPDPEKFKPEHFLNENGKFKYSDYFKAFSAGKRVCVGEGLARMELFLLLSAILQHFNLKSLVDPKDIDLSPVTVGFGSIPPQFKLCVIPRS

SEQ ID NO: 1669 - protein, 493 aa, Homo sapiens; identical to SEQ ID NO: 1668

SEQ ID NO: 1670 - protein, 493 aa, Homo sapiens; identical to SEQ ID NO: 1668

SEQ ID NO: 1671 - protein, 299 aa, Homo sapiens
MSSIKIECVLRENYRCGESPVWEEASKCLLFVDIPSKTVCRWDSISNRVQRVGVDAPVSSVALRQSGGYVATIGTKFCALNWEDQSVFILAMVDEDKKNNRFNDGKVDPAGRYFAGTMAEETAPAVLERHQGSLYSLFPDHSVKKYFDQVDISNGLDWSLDHKIFYYIDSLSYTVDAFDYDLPTGQISNRRTVYKMEKDEQIPDGMCIDVEGKLWVACYNGGRVIRLDPETGKRLQTVKLPVDKTTSCCFGGKDYSEMYVTCARDGMSAEGLLRQPDAGNIFKITGLGVKGIAPYSYAG

SEQ ID NO: 1672 - protein, 561 aa, Homo sapiens
MCLYALILVFLAAFTAGGHPSSLPVVDTLQGKVLGKYVSLEGFTQPVAVFLGVPFAKPPLGSLRFAPPQPAEPWSFVKNTTSYPPMCSQDPVAGQIVNDLLTNWEENISLQFSEDCLYLNIYTPADLTKRDRLPVMVWIHGGGLVLGGASTYDGLALSTHENVVVVVIQYRLGIWGFFSTGDEHSRGNWGHLDQVAALHWVQDNIDNFGGDPGSVTIFGESAGGESVSVLVLSPLAKNLFHKAISESGVALTAGLVKKNTRPLAEKIAVVSGCKSTTSASMVHCLRQKTEEELLETTLKLNLFSLDLHGDSRQSYPFVPTVLDGVVLPKMPEEILAEKDFNTVPYIVGINKQEFGWILPTMMNYPPSDMKLDPMTATSLLKKSSFLLNLPEEAIPVAVEKYLRHTDDPDRNKDQLLELIGDVIFGVPSVIVSRGHRDAGARTYMYEFQYRPSFSSKMKPSTVVGDHGDEIYSVFGAPILRGGTSKEEINLSKMMMKFWANFARNGNPNGQGLPHWPEYDQKEGYLQIGATTQQAQKLKEKEVAFWSELLAMKPLHAGHTEL

SEQ ID NO: 1673 - protein, 678 aa, Homo sapiens
MGDSHEDTSATMPEAVAEEVSLFSTTDMVLFSLIVGVLTYWFIFRKKKEEIPEFSKIQTTAPPVKESSFVEKMKKTGRNIIVFYGSQTGTAEEFANRLSKDAHRYGMRGMSADPEEYDLADLSSLPEIDKSLVVFCMATYGEGDPTDNAQDFYDWLQETDVDLTGVKFAVFGLGNKTYEHFNAMGKYVDQRLEQLGAQRIFELGLGDDDGNLEEDFITWREQFWPAVCEFFGVEATGEESSIRQYELVVHEDMDVAKVYTGEMGRLKSYENQKPPFDAKNPFLAAVTANRKLNQGTERHLMHLELDISDSKIRYESGDHVAVYPANDSALVNQIGEILGADLDVIMSLNNLDEESNKKHPFPCPTTYRTALTYYLDITNPPRTNVLYELAQYASEPSEQEHLHKMASSSGEGKELYLSWVVEARRHILAILQDYPSLRPPIDHLCELLPRLQARYYSIASSSKVHPNSVHICAVAVEYEAKSGRVNKGVATSWLRAKEPAGENGGRALVPMFVRKSQFRLPFKSTTPVIMVGPGTGIAPFMGFIQERAWLREQGKEVGETLLYYGCRRSDEDYLYREELARFHKDGALTQLNVAFSREQAHKVYVQHLLKRDREHLWKLIHEGGAHIYVCGDARNMAKDVQNTFYDIVAEFGPMEHTQAVDYVKKLMTKGRYSLDVWS

SEQ ID NO: 1674 - protein, 678 aa, Homo sapiens; identical to SEQ ID NO: 1673

SEQ ID NO: 1675 - protein, 678 aa, Homo sapiens; identical to SEQ ID NO: 1673

SEQ ID NO: 1676 - protein, 173 aa, Homo sapiens
MARMNRPAPVEVTYKNMRFLITHNPTNATLNKFIEELKKYGVTTIVRVCEATYDTTLVEKEGIHVLDWPFDDGAPPSNQIVDDWLSLVKIKFREEPGCCIAVHCVAGLGRAPVLVALALIEGGMKYEDAVQFIRQKRRGAFNSKQLLYLEKYRPKMRLRFKDSNGHRNNCCIQ

SEQ ID NO: 1677 - protein, 429 aa, Homo sapiens
MAAQGYGYYRTVIFTAMFGGYSLYYFNRKTFSFVMPSLVDEIALDKDDLGLITSSQSAAYAISKFVSGVLSDQMSARWLFSSGLLLVGLVNVVFSWSSTVTAFAALWFLNGLAQGLGWPPCGKILRKWFEPSQFGTWWAVLSTSMNLAGSLGPILATILAQSYSWRSTLALSGSLCVVVSFFCLLLIHNEPADVGLRNLDPAPSKGKKGSSKEESTLQDLLLSPYLWVLSTGYLVVFGVKTCCTDWGQFFLIQERGQSALVGSSYISALEVGGLVGSIAAGYLSDRAMAKAGLSVYGNPRHSLLLLMMAGMAASMFLFRVTVTSDSPKIWILVLGAVFGFSSYGPIALFGVIANESAPPNLCGTSHAIVGLMANVGGFLAGLPFSTIAKHYSWSTAFWVAEVICIASTVVFFLLRNIRTKMGRVSKKAE

SEQ ID NO: 1678 - protein, 429 aa, Homo sapiens; identical to SEQ ID NO: 1677

SEQ ID NO: 1679 - protein, 498 aa, Homo sapiens
  misc_feature (497)..(497): Xaa is amino acid Selenocysteine
MNDSKDAPKSYDFDLIIIGGGSGGLAAAKEAAKFDKKVMVLDFVTPTPLGTNGGLGGTCVNVGCIPKKLMHQAALLGQALKDSRNYGWKLEDTVKHDWEKMTESVQNHIGSLNWGYRVALREKKVVYENAYGKFIGPHKIMATNNKGKEKVYSAERFLIATGERPRYLGIPGDKEYCISSDDLFSLPYCPGKTLVVGASYVALECAGFLAGIGLDVTVMVRSILLRGFDQDMANKIGEHMEEHGIKFIRQFVPTKIEQIEAGTPGRLKVTAKSTNSEETIEDEFNTVLLAVGRDSCTRTIGLETVGVKINEKTGKIPVTDEEQTNVPYIYAIGDILEGKLELTPVAIQAGRLLAQRLYGGSTVKCDYDNVPTTVFTPLEYGCCGLSEEKAVEKFGEENIEVYHSFFWPLEWTVPSRDNNKCYAKVICNLKDNERVVGFHVLGPNAGEVTQALQPLKCGLTKQQLDSTIGIHPVCAEIFTTLSVTKRSGGDILQSGCXG

SEQ ID NO: 1680 - protein, 498 aa, Homo sapiens; identical to SEQ ID NO: 1679
  misc_feature (497)..(497): Xaa is amino acid Selenocysteine

SEQ ID NO: 1681 - protein, 332 aa, Homo sapiens
MSTKNFRVSDGDWICPDKKCGNVNFARRTSCNRCGREKTTEAKMMKAGGTEIGKTLAEKSRGLFSANDWQCKTCSNVNWARRSECNMCNTPKYAKLEERTGYGGGFNERENVEYIEREESDGEYDEFGRKKKKYRGKAVGPASILKEVEDKESEGEEEDEDEDLSKYKLDEDEDEDDADLSKYNLDASEEEDSNKKKSNRRSRSKSRSSHSRSSSRSSSPSSSRSRSRSRSRSSSSSQSRSHSGSREHSRSRGSKSRSSSRSTGALLPQEKDLTRVLHHLLKETGRGVALDLLHQLFAKKDERDHGHPKGTTGRLRINPFWFPFKFKKEIMY

SEQ ID NO: 1682 - protein, 445 aa, Homo sapiens
MSLWLEAAVPDVSPDSATELWKTEPQDAGDQGGNTCILREEARMPQSTGGALRIGLESSEPTALLPRAETLPEPTELRPQKRKKGPAPKMLGNELCSVCGDKASAFHYNVLSCEGCKGFFRRSVIKGARYICHSGGHCPMDTYMRRKCQECRLRKCRHAGMREECVLSEEQIRLKKLKRQEEEQAQATSVSPRVSSPPQVLPQLSPEQLGMIEKLVAAQQQCNRRSFSDRLRVTPWPIAPDPQSREARQQRFAHFTELAIVSVQEIVDFAKQLPGFLQLSREDQIALLKTSAIEVMLLETSRRYNPGSESITFLKDFSYNREDFAKAGLQVEFINPIFEFSRSMNELQLNDAEFALLIAISIFSADRPNVQDQLQVERLQHTYVEALHAYVSINHPHDRLMFPRMLMKLVSLRTLSSVHSEQVFALRLQDKKLPPLLSEIWDVHE

SEQ ID NO: 1683 - protein, 232 aa, Homo sapiens
MDPMSAPARSITRTQNPMLTGTSVLGVKFDCGVVIAADMLGSYGSLARFRIISRIMRVNDSTMLGASGDYADFQYLKQVLGQMVIDEELFGDGHSYSPRAIHSWLTRAMYSRRSKMNPLWNTKVIGGYAGGESFLGYVDMLGVAYEAPSLATGYGAYLAQPLLREVLEKQPVLSQTEARELVERCMRVLYYRDARSYNRFQVATVTEKGVEIEGPLSAQTNWDIAHMISGFE

SEQ ID NO: 1684 - protein, 472 aa, Homo sapiens
MRFLFFLFVAVVHLFSLGSGKAIYKSGVSQRTFQEIKEEIANYEDVAKAIINLAVYGKYQNRSYERLGLLVDTVGPRLSGSKNLEKAIQIMYQNLQQDGLENVHLEQVRIPHWGRGEESAVMVVPRIHKLAILGLGGSIGTPPEGITAEVLVVASFVELQRRASEARGKIVVYNQPYTDYGKTVQYRERGAVEAAKVGAVASLIRSVASFSIYSPHTGHQGYQDGVPKIPTACITIEDAEMMSRMASRGDKIVIHLKMGAKTYPDTDSFNTVAEITGSKYPEEVVLVSGHLDSWDVGQGALDDGGGAFISWEALSLVKDLGLRPKRTLRLVLWTAEEQGGVGASQYYELHKANISKYSLVMEADSGTFLPTGLQFTGSDKARAIMKEVMSLLQPLNITKVFNDAEGTDINFWIQAGVPGASLRDDLYKYFFFHHSHGDTMTAMDPKQMNVAAAVWAVVAYVVADMEEMLPRS

SEQ ID NO: 1685 - protein, 92 aa, Homo sapiens
MAPLHHILIVCVCLLSMASAEAPQEPDPFTYDYHTLRIGGLTAGILLFILGILIILSKRCRCKFNQQQRTGEPDEEEGTFRSSIRRLSTRRR

SEQ ID NO: 1686 - protein, 92 aa, Homo sapiens; identical to SEQ ID NO: 1685

SEQ ID NO: 1687 - protein, 824 aa, Homo sapiens
MEGPRSDVGRWGRSPWQPTTPSPEPEPEPEPDRSSRSRRGGGRSFWARCCGCCSCGNRADDDWGPEPSGSRSRGTSSRGGGSRGGDSRGRDSRGGRRPESRGSGVNAAGDGTIREGMLVVNGVDLLCSRSDQNRREHHTDEFEYDELILRRGQPFHIILFLNREYESSDRIALELLIGNNPEVGKGTHVIIPVGKGGSGGWKAQVTKTNGHNLTLRVHTSPNAIIGKFQFTVRTRSEAGEFQLPFDPRNEIYILFNPWCPEDIVYVDHEDWRQEYVLNESGRIYYGTEAQIGERTWNYGQFDHGVLDACLYILDRRGMPYGGRGDPVSVSRVVSAMVNSLDDNGVLIGNWTGDYSRGTNPSAWVGSVEILLSYLRTGYSVPYGQCWVFAGVTTTVLRCLGLATRTVTNFNSAHDTDTSLTMDIYFDENMKPLEHLNHDSVWNFHVWNDCWMKRPDLPSGFDGWQVVDATPQETSSGIFCCGPCSVESIKNGLVYMKYDTPFIFAEVNSDKVYWQRQDDGSFKIVYVEEKAIGTLIVTKAINSNMREDITHIYKHPEGSEAERKAVEKAAAHGSKPNVYATRDSAEDVAMQVEAQDAVMGQDLTVSVVLTNRGSSRRTVKLHLYLCVTYYTGVSGPTFKETKKEVVLAPGASDTVAMPVAYKEYKPHLVDQGAMLLNVSGHVKESGQVLAKQHTFRLRTPDLSLTLLGAAVVGQECEVQIVFKNPLPITLTNVVFRLEGSGLQRPKVLNVGDIGGNETVTLRQTFVPVRPGPRQLIASLDSPQLSQVHGVIQVDVAPSSGGRGFSEAVGDSRSGENIPMAFRGGA

SEQ ID NO: 1688 - protein, 1277 aa, Homo sapiens
MKYALKRLITGLGVGREAARPCYSLALAQLLQSFEDIQLCDILGQIQEKYNLQAMNKAMMRPTLFANLFAVLALFQSGRLVKDKEALMKCVRLLKILSHHYNHLQGQPVKALVDILSEVPESMFQEILPKVLKGDMKVILSSPKYLELFLLARQRVPAELESLVGSVDLFSEDNIPSLVNILKVAANSVKKEQKLPDVALNLLRLALQENKFERFWKEVLEEGLLKKPSYTSSYMCFRLLGASLPLLSDEQLQLVMRGDLIRHFGEHMVVSKSQNPLRFIPEISAYVGTFLEGCQDDPKRQFTVMVAFTAITNQGLPVMPTFWRVTRFLNTEALQNYVTWLRDMFLQPDLDSLVDFSTANQKRVQDASLNVPERTVFRLRKWIIHRLVSLVDHLHLEKDEAVVEQIARFCLFHAFFKTKKATPQIPETKQHFSFPLEDGNRGVIVSAFFSLLQTLSVKFRQTPDLAENGKPWTYRLVQLADMLLKHNRNVANVTPLTAQQRQAWDQMMSTLKELEAQSSETRAIAFQHLLLLVGLHLFKSPAESCDVLGDIQTCIKKSMEQNLRRSRSRAKASQEPVWVEVMVEILLSLLAQPSNLMRQVVRSVFGHVCSHLTPRGLQLILAVLNPETNEDEEDNVVVTDTDEKQLKHGEDADSDSEDSKNSESDVDSEDGEESEEEDRDKDVDPGFRQQLMEVLQAGNALGGEEEEEEELGDEAMMALDQNLASLFAEQKMRIQARHEEKNKLQKEKQLRRDFQIRALDLIEVLVTKQPEHPLILELLEPLLNIIQRSMRSRGSTKQEQDLLHKTARIFMHHLCRARHYCHEVEPGAEALHAQVERFVQQAGNQADASVALYYFNASLYLLRVLKGNTTKRYQDGQKLEGADIKSEPKDSEVQTTSCLDLDFVTRVYSASLESLLTKRNSPLTIPMFLDLFSRYPVICKNLLPIVVQHVAGSSRPRHQAQACLLLQKALSARELRVCFEDPEWEQLISQVLGKTTQTLQTLGEAQSKGEHQRELSILELLNTVFRIVNHEKLSVDLTAFLGMLQGKQQKLQQNLQQGNHSSGSSRLYDLYWQAMNLLGVQRPKSEKKNVKDIPSDSQSPISTKRKKKGFLPETKKRKKLKSEGTTSEKKAASQQDRVTEGAMPAATGKDQPPSTGKKRRKRVKANTPSQVNGVTVAKSPAPNNPTLSPSTPPAKTPKVQKKKEKLSQVNGSTPVSPVEPESKKHQKALSTKEVKRRSSQSALPKKRARLSLVSRSPSLLQSGIRKRRVARRRVQTP

SEQ ID NO: 1689 - protein, 1277 aa, Homo sapiens; identical to SEQ ID NO: 1688

SEQ ID NO: 1690 - protein, 457 aa, Homo sapiens
MTTSHQPQDRYKAVWLIFFVLGLGTLLPWNFFITATQYFTSRLNTSQNISLVTNQSCESTEALADPSVSLPARSSLSAIFNNVMTLCAMLPLLIFTCLNSFLHQKVSQSLRILGSLLAILLVFLVTATLVKVQMDALSFFIITMIKIVLINSFGAILQASLFGLAGVLPANYTAPIMSGQGLAGFFTSVAMICAVASGSKLSESAFGYFITACAVVILAILCYLALPWMEFYRHYLQLNLAGPAEQETKLDLISEGEEPRGGREESGVPGPNSLPANRNQSIKAILKSIWVLALSVCFIFTVTIGLFPAVTAEVESSIAGTSPWKNCYFIPVACFLNFNVFDWLGRSLTAICMWPGQDSRWLPVLVACRVVFIPLLMLCNVKQHHYLPSLFKHDVWFITFMAAFAFSNGYLASLCMCFGPKKVKPAEAETAGNIMSFFLCLGLALGAVLSFLLRALV

SEQ ID NO: 1691 - protein, 128 aa, Homo sapiens
MQIFVKTLTGKTITLEVEPSDTIENVKAKIQDKEGIPPDQQRLIFAGKQLEDGRTLSDYNIQKESTLHLVLRLRGGIIEPSLRQLAQKYNCDKMICRKCYARLHPRAVNCRKKKCGHTNNLRPKKKVK

SEQ ID NO: 1692 - protein, 631 aa, Homo sapiens
MAPPGSSAVFLLALTITASTQALTPTHYLTKHDVERLKASLDRPFTSLESAFYSIVGLNSLGAQVPDVKKACAFIKSNLDPSNVDSLFYAAQSSQVLSGCEISVSNETRDLLLAAVSEDSSVAQIYHAVAALSGFGLPLASHEALGALTARLSKEETVLATVQALHTASHLSQQADLRNIVEEIEDLVARLDELGGVYLQFEEGLELTALFVAATYKLMDHVGTEPSIKEDQVIQLMNTIFSKKNFESLSEAFSVASAAAALSQNRYHVPVVVVPEGSASDTQEQAILRLQVSSVLSHALAQAAVKLEHAKSVASRATVLQKMPFSLVGDVFELNFKNVKLPSGYYDFSVRVEGDNRYIANTVELRVKISTEVGITNADLSTVDKDQSIPPKTTRVTYPAKAKGTFIADSHQNFALFFQLVDVNTGAELTPHQTFVRLHNQKTGQEVVFVAEPDNKNVHKFELDTSERKIEFDSASGTYTLYLIIGDATLKNPILWNVADVVIKFPEEEAPSTVLSQNLFTPKQEIQHLFREPEKRPPTVVSNTFTALILSPLLLLFALWIRIGANVSNFTFAPTTIIFHLGHAAMLGLMYVYWTQLNMFQTLKYLAVLGTVTFLAGNRMLAQQAVKRTAH

SEQ ID NO: 1693 - protein, 519 aa, Homo sapiens
MAPQERLLIRGGRVVNDDFSQVADVLVEDGVVRALGRDLLPPGDTSRGLRILDAAGKLVLPGGIDTHTHMQFPFMGSQSVDDFHQGTKAALAGGTTMIIDFAIPQKGSSLIEAFETWRNWADPKVCCDYSLHVAVTWWSDKVKEEMKTLAQDKGVNSFKMFMAYKDLYMVQDQQMYAAFSQCKEIGAIAQVHAENGDLIAEGAKKMLALGITGPEGHELCRPEAVEAEATLRAITIASAVNCPLYIVHVMSKSAAKVIADAKREGKVVYGEPIAAGLGTDGTQYWNKEWRHAAHHVMGPPLRPDPSTPGFLMNLLANGDLTTTGSDNCTFNTCQKALGKDDFTKIPNGVNGVEDRMSVIWEKGVHSGKMDENRFVAVTSTNAAKIFNLYPKKGRIAVGSDADMVIWDPEATRTISAKTHHQAVNFNIFEGMVCHGVPLVTISRGRVVYEAGVFDVTAGHGKFIPRQPFAEFIYKRVKQRDQTCTPIPVKRAPYKGEVITLKPRETKEDDTAGTRMQGHS

SEQ ID NO: 1694 - protein, 519 aa, Homo sapiens; identical to SEQ ID NO: 1693

SEQ ID NO: 1695 - protein, 208 aa, Homo sapiens [sequence omitted]

SEQ ID NO: 1696 - protein, 130 aa, Homo sapiens
MAEEGIAAGGVMDVNTALQEVLKTALIHDGLARGIREAAKALDKRQAHLCVLASNCDEPMYVKLVEALLAEHQINLIKVDDNKKLGEWVGLCKIDREGKPRKVVGCSCVVVKDYGKESQAKDVIEEYFKC

SEQ ID NO: 1697 - protein, 137 aa, Homo sapiens
MSSIIRKVISTSKAPAAIGAYSQAVLVDRTIYVSGQIGMDPSSGQLVPGGVAEEANQALKNLGEILKAAGCDFTNVVKTTVLLADINDFGTVNEIYKTYFQGNLPARAAYQVAALPKGSRIEIEAIAVQGPFTTAGL

SEQ ID NO: 1698 - protein, 304 aa, Homo sapiens
MSLEKMKDLHLGEQDLQPETREVNGILMSKLMSDNWDKIWNFQAKPDDLLIATYAKAGTTWTQEIVDMIQNDGDVQKCQRANTYDRHPFIEWTLPSPLNSGLDLANKMPSPRTLKTHLPVHMLPPSFWKENSKIIYVARNAKDCLVSYYYFSRMNKMLPDPGTLGEYIEQFKAGKVLWGSWYDHVKGWWDVKDQHRILYLFYEDMKEDPKREIKKIAKFLEKDISEEVLNKIIYHTSFDVMKENPMANYTTLPSSIMDHSISPFMRKGMPGDWKNYFTVAQSEDFDEDYRRKMAGSNITFRTEI

SEQ ID NO: 1699 - protein, 304 aa, Homo sapiens; identical to SEQ ID NO: 1698

SEQ ID NO: 1700 - protein, 185 aa, Homo sapiens
MAAQKDQQKDAEVEGLSATTLLPKLIPSGAGREWLERRRATIRPWGTFVDQQRFSRPRNVGELCQRLVRNVEYYQSNYVFVFLGLILYCVVTSPMLLVALAVFFGACYILYLRTLQSKLVLFGREVSPAHQYALAGGVSFPFFWLAGAGSAVFWVLGATLVLIGSHAAFHQIEPADGEELQMEPV

SEQ ID NO: 1701 - protein, 262 aa, Homo sapiens
MADGFSLNDALAGSGNPNPRGWPGAWGNQPGAGGYPGASYPGAYPGQAPPGGYPGQAPPSAYPGPTGPSAYPGPTAPGAYPGPTAPGAFPGQPGGPGAYPSAPGAYPSAPGAYPATGPFGAPTGPLTVPYDMPLPGGVMPRMLITIIGTVKPNANSITLNFKKGNDIAFHFNPRFNENNRRVIVCNTKQDNNWGREERQSAFPFESGKPFKIQVLVEADHFKVAVNDVHLLQYNHRMKNLREISQLGIIGDITLTSASHAMI

SEQ ID NO: 1702 - protein, 291 aa, Homo sapiens
MEFSRPPLVHVKGIPLIKYFAETIGPLQNFTAWPDDLLISTYPKSGTTWMSEILDMIYQGGKLEKCGRAPIYARVPFLEFKCPGVPSGLETLEETPAPRLLKTHLPLSLLPQSLLDQKVKVIYIARNAKDVVVSYYNFYNMAKLHPDPGTWDSFLENFMDGEVSYGSWYQHVKEWWELRHTHPVLYLFYEDIKENPKREIKKILEFLGRSLPEETVDSIVHHTSFKKMKENCMTNYTTIPTEIMDHNVSPFMRKGTTGDWKNTFTVAQNERFDAHYAKTMTDCDFKFRCEL

SEQ ID NO: 1703 - protein, 291 aa, Homo sapiens; identical to SEQ ID NO: 1702

SEQ ID NO: 1704 - protein, 214 aa, Homo sapiens
MNFLLSWVHWTLALLLYLHHAKWSQAAPTTEGEQKAHEVVKFMDVYQRSYCRPIETLVDIFQEYPDEIEYIFKPSCVPLMRCAGCCNDEALECVPTSESNVTMQIMRIKPHQSQHIGEMSFLQHSRCECRPKKDRTKPEKKSVRGKGKGQKRKRKKSRFKSWSVHCEPCSERRKHLFVQDPQTCKCSCKNTDSRCKARQLELNERTCRCDKPRR

SEQ ID NO: 1705 - protein, 353 aa, Homo sapiens
MNGDQKLDVHNQEKQNFIQHFSQIVKVLTEDELGHPEKGDAITRIKEVLEYNTVGGKYNRGLTVVQTFQELVEPRKQDAESLQRALTVGWCVELLQAFFLVLDDIMDSSHTRRGQICWYQKPGIGLDAINDALLLEAAIYRLLKFYCREQPYYLNLLELFLQSSYQTEIGQTLDLITAPQGQVDLGRYTEKRYKSIVKYKTAFYSFYLPIAAAMYMAGIDGEKEHANALKILLEMGEFFQIQDDYLDLFGDPSVTGKVGTDIQDNKCSWLVVQCLLRATPQQRQILEENYGQKDPEKVARVKALYEELDLRSVFFKYEEDSYNRLKSLIEQCSAPLPPSIFLELANKIYKRRK

SEQ ID NO: 1706 - protein, 353 aa, Homo sapiens; identical to SEQ ID NO: 1705

SEQ ID NO: 1707 - protein, 358 aa, Homo sapiens
MPAHILQEISGSYSATTTITAPPSGGQQNGGEKFEKNPHHWGADVRPEIKDDLYDPSYQDEEGPPPKLEYVWRNIILMALLHIGALYGITLVPSCKVYTCLFAYLYYVISALGITAGAHRLWSHRTYKARLPLRLFLIIANTMAFQNDVYEWARDHRAHHKFSETHADPHNSRRGFFFSHVGWLLVRKHPAVKEKGGKLDMSDLKAEKLVMFQRRYYKPGLLLMCFILPTLVPWYCWGETFVNSLCVSTFLRYAVVLNATWLVNSAAHLYGYRPYDKNISSRENILVSMGAVGEGFHNYHHAFPYDYSASEYRWHINFTTFFIDCMALLGLAYDRKRVSKAAVLARIKRTGEESCKSG

SEQ ID NO: 1708 - protein, 87 aa, Homo sapiens
MSQADFDKAAEEVKRLKTQPTDEEMLFIYSHFKQATVGDVNTDRPGLLDLKGKAKWDSWNKLKGTSKENAMKTYVEKVEELKKKYGI

SEQ ID NO: 1709 - protein, 102 aa, Homo sapiens
MSEKSVEAAAELSAKDLKEKKDKVEEKAGRKERKKEVVEEEENGAEEEEEETAEDGEDDDEGDEEDEEEEEEEDEGPVRKRTAEEEDEADPKRQKTENGASA

SEQ ID NO: 1710 - protein, 102 aa, Homo sapiens; identical to SEQ ID NO: 1709

SEQ ID NO: 1711 - protein, 270 aa, Homo sapiens
MGNTSSERAALERQAGHKTPRRDSSEGTKDGDRPKILMDSPEDADIFHTEEMKAPEKEEFLAWQHDLEVNEKAPAQARPTVFRWTGGGKEVYLSGSFNNWSKLPLTRSQNNFVAILDLPEGEHQYKFFVDGQWTHDPSEPIVTSQLGTVNNIIQVKKTDFEVFDALMVDSQKCSDVSELSSSPPGPYHQEPYISKPEERFKAPPILPPHLLQVILNKDTGISCDPALLPEPNHVMLNHLYALSIKDGVMVLSATHRYKKKYVTTLLYKPI

SEQ ID NO: 1712 - protein, 953 aa, Homo sapiens
MITSAAGIISLLDEEEPQLKEFALHKLNAVVNDFWAEISESVDKIEVLYEDEGFRSRQFAALVASKVFYHLGAFEESLNYALGAGDLFNVNDNSEYVETIIAKCIDHYTKQCVENADLPEGEKKPIDQRLEGIVNKMFQRCLDDHKYKQAIGIALETRRLDVFEKTILESNDVPGMLAYSLKLCMSLMQNKQFRNKVLRVLVKIYMNLEKPDFINVCQCLIFLDDTQAVSDILEKLVKEDNLLMAYQICFDLYESASQQFLSSVIQNLRTVGTPIASVPGSTNTGTVPGPEKDSDSMETEEKTAGAVAGKTPDASPEPKDQTLKMIKILSGEMAIELHLQFLIRNNNTDLMILKNTKDAVRNSVCHTATVIANSFMHCGTTSDQFLRDNLEWLARATNWAKFTATASLGVIHKGHEKEALQLMATYLPKDTSPGSAYQEGGGLYALGLIHANHGGDIIDYLLNQLKNASNDIVRHGGSLGLGLAAMGTARQDVYDLLKTNLYQDDAVTGEAAGLALGLVMLGSKNTQAIEDMVGYAQETQHEKILRGLAVGIALVMYGRMEEADALIESLCRDKDPILRRSGMYTVAMAYCGSGNNKAIRRLLHVAVSDVNDDVRRAAVESLGFILFRTPEQCPSVVSLLSESYNPHVRYGAAMALGVCCAGTGNKEAINLLEPMTNDPVNYVRQGALIASALIMIQQTEITCPKVNQFRQLYSKVINDKHDDVMAKFGAILAQGILDAGGHNVTISLQSRTGHTHMPSVVGVLVFTQFWFWFPLSHFLSLAYTPTCIIGLNKDLKMPKVQYKSNCKPSTFAYPAPLEVPKEKEKEKVSTAVLSITAKAKKKEKEKEKKEEEKMEVDEAEKKEEKEKKKEPEPNFQLLDNPARVMPAQLKVLSMTETCRYQPFKPLSIGGIIILKDTSEDIEELVEPVAAHGPKIEEEEQEPEPPEPFEYIDD

SEQ ID NO: 1713 - protein, 953 aa, Homo sapiens; identical to SEQ ID NO: 1712

SEQ ID NO: 1714 - protein, 361 aa, Homo sapiens
MSEAGEATTGGTTLPQAAADAPAAAPPDPAPKSPAASGAPQAPAPAALLAGSPGGDAAPGPAPASSAPAGSEDAEKKVLATKVLGTVKWFNVRNGYGFINRNDTKEDVFVHQTAIKKNNPRKYLRSVGDGETVEFDVVEGEKGAEAANVTGPDGVPVEGSRYAADRRRYRRGYYGRRRGPPRNYAGEEEEEGSGSSEGFEPPAADGQFSGARNQLRRPQYRPPYRQRRFPPYHVGQTFDRRSRVFPHPNRMQAGEIGEMKDGVPEGAQLQVHRNPTYRPRFRRGPARPRPAPAIGEAEDKENQQAANGPNQPSARRGFRRPYNYRRRPRPLNAVSQDGKETKAGEAPTENPAPATEQSSAE

SEQ ID NO: 1715 - protein, 612 aa, Homo sapiens
MENQLAKSIEERTFQYQDSLPPLPVPSLEESLKKYLESVKPFANEDEYKKTEEIVQKFQDGVGKTLHQKLLERAKGKRNWLEEWWLNVAYLDVRIPSQLNVNFVGPSPHFEHYWPAREGTQLERGSILLWHNLNYWQLLRREKLPVHKSGNTPLDMNQFRMLFSTCKVPGITRDSIMNYFKTESEGHCPTHIAVLCRGRAFVFDVLHDGCLITPPELLRQLTYIYQKCWNEPVGPSIAALTSEERTRWAKAREYLIGLDPENLTLLEKIQSSLFVYSIEDTSPHATPENFSQVFEMLLGGDPAVRWGDKSYNLISFANGIFGCSCDHAPYDAMLMVNIAHYVDEKLLETEGRWKGSEKVRDIPLPEELAFTVDEKILNDVYQAKAQHLKAASDLQIAASTFTSFGKKLTKKEALHPDTFIQLALQLAYYRLHGRPGCCYETAMTRYFYHGRTETVRSCTVEAVRWCQSMQDPSASLLERQQKMLDAFAKHNKMMRDCSHGKGFDRHLLGLLLIAKEEGLPVPELFEDPLFSRSGGGGNFVLSTSLVGYLRIQGVVVPMVHNGYGFFYHIRDDRFVVTCSSWRSCLETDAEKLVEMIFHAFHDMIHLMNTAHL

SEQ ID NO: 1716 - protein, 612 aa, Homo sapiens; identical to SEQ ID NO: 1715

SEQ ID NO: 1717 - protein, 291 aa, Homo sapiens
MERALPAAGFLYWVGASTIAYLTLRASYSLFRAFQVWCVGNQAFVGPRLGEWAVVTGGTDGIGKSYAEELAKRGMKIVLISRSQDKLKEVSNNIKEKFNVETRTIAVDFSLDDIYDKIKTGLSGLEIGVLVNNVGMSYEYPEYFLEIPDLDNTIKKLININVLSICKVTRLVLPGMVERSKGVILNISSASGMLPVPLLTVYSATKAFVDFFSQCLHEEYKSKGIFVQSVLPFFVSTKLAKIRKPTLDKPSAETFVKSAIKTVGLQTRTTGICDPRHHGLNKLNLAPLDLF

SEQ ID NO: 1718 - protein, 494 aa, Homo sapiens
MKPAGTGPTVSSGGESTDVSLGPPFPWPCPPDVRLCGHLRKQKSQRRRFFVLRADPPRLECYESEKKFLASGCRPPRPRRTVSLEGACTISKRADARQRHLIVIYTSDSSLGVAAASEAEQQTWYSALLEVRATAAAAAATAMGFSPQEAPESWIFAPFQDVWPVTLRSKGLGRAPGLSSGSYRLCLGSGALSLLRKPGSKGSRDSRATPPPVLRLSLLSVRRCGHADSFFFLELGRSAPIGPGELWLQAPDAVVAQSIHETVLAAMKRLGSSAASGKAEAPLGDSPKGASAVPAPAPYEIPALALAAQARSPGERAKQDYVNPLERMGSAPSYRGPDLGGDYIAMGMRNDYVHMGGKAAEYMWMAPPGLPPPTPPRVDPRKEPEDCESTEYMPMNRFLPGPLYYEFKAREPEHGHSSAQCSIRDRWRPMVAQPRSSQGSELSGDYMYIPDYPSARLGSLDSCLNYVDLDLVPPLEVPGAAPGNSPHSYASIKF

SEQ ID NO: 1719 - protein, 353 aa, Homo sapiens
MPLVCLADFKAHAQKQLSKTSWDFIEGEADDGITYSENIAAFKRIRLRPRYLRDMSKVDTRTTIQGQEISAPICISPTAFHSIAWPDGEKSTARAAQEANICYVISSYASYSLEDIVAAAPEGFRWFQLYMKSDWDFNKQMVQRAEALGFKALVITIDTPVLGNRRRDKRNQLNLEANILLKDLRALKEEKPTQSVPVSFPKASFCWNDLSLLQSITRLPIILKGILTKEDAELAMKHNVQGIVVSNHGGRQLDEVSASIDALREVVAAVKGKIEVYMDGGVRTGTDVLKALALGARCIFLGRPILWGLACKGEDGVKEVLDILTAELHRCMTLSGCQSVAEISPDLIQFSRL

SEQ ID NO: 1720 - protein, 1249 aa, Homo sapiens
MKLKEIDRTAMQAWSPAQNHPIYLATGTSAQQLDATFSTNASLEIFELDLSDPSLDMKSCATFSSSHRYHKLIWGPHKMDSKGDVSGVLIAGGENGNIILYDPSKIIAGDKEVVIAQKDKHTGPVRALDVNIFQTNLVASGANESEIYIWDLNNFATPMTPGAKTQPPEDISCIAWNRQVQHILASASPSGRATVWDLRKNEPIIKVSNHSNWMHCSGLAWHPDVATQMVLASEDDRLPVVQMWDLRFASSPLRVLENHARGILAIAWSMADPELLLSCGKDAKILCSNPNTGEVLYELPTNTQWCFDIQWCPRNPAVLSAASFDGRIRVYSIMGGSIDGLRQKQVDKLSSSFGNLDPFGTGQPLPPLQIPQQTSQHSIVLPLKKPPKWIRRPVGASFSFGGKLVTFENVTGQPQQGAEQPRRQPVFISQVVTEKDFLSRSEQLQHVVESQGFISYCQKKIDASQTDFEKNVWSFLKVKFEEDSRGKYLELLGYRREDLGEKIALALNRVDGSDVALKDSDRVAQSDGEESPAEEGQLLGERIKEEKQECDFLPSAGGGTFNISVSGDIDGLITRALLTGNFESAVDLCLHDNRMADAIILAIAGGQELLAQTQKKYFAKSQSKITRLITAVVMKNWKEIVESCDLKNWREALAAVLTYAKPDEFSALCDLLGARLESEGDSLLRTQACLCYICAGNVERLVACWTKAQDGSNPLSLQDLIEKVVILRKAVQLTQALDTNTVGALLAEKMSQYANLLAAQGSIAAALAFLPDNTNQPDIVQLRDRLCRAQGRSVPGQESSRSSYEGQPLPKGGPGPFAGHPQVSRVQSQQYYPQVRIAPTVTTWSDRTPTALPSHPPAACPSDTQGGNPPPPGFIMHGNVVPNSPAPLPTSPGHMHSQPPPYPQPQPYQPAQQYSLGTGGSAVYRPQQPVAPPASKRYPNAPYVSPVASYSGQPHMYTAQPASSPTSSSAPLPPPPSSGASFQHGGPGAPPSSSAYALPPGTTGTPPAASELPASQRTGPQNGWNDPPALNRVPKKKKLPENFMPPVPITSPIMNPGGDPQPQGLQQQPSASGPRSSHASFPQPHLAGGQPFHGIQQPLAQTGMPPSFSKPNTEGAPGAPIGNTIQHVQALPTEKITKKPIPDEHLILKTTFEDLIQRCLSSATDPQTKRKLDDASKRLECLYDKLRDQTLSPTIISGLHSIARSIETRNYSEGLTVHTHIVSTSNFSETSAFMPVLKVVLSQASKLGV

SEQ ID NO: 1721 - protein, 147 aa, Homo sapiens
MVHLTDAEKAAVNGLWGKVNPDDVGGEALGRLLVVYPWTQRYFDSFGDLSSASAIMGNPKVKAHGKKVINAFNDGLKHLDNLKGTFAHLSELHCDKLHVDPENFRLLGNMIVIVLGHHLGKEFTPCAQAAFQKVVAGVASALAHKYH

SEQ ID NO: 1722 - protein, 433 aa, Homo sapiens
MPDYLGADQRKTKEDEKDDKPIRALDEGDIALLKTYGQSTYSRQIKQVEDDIQQLLKKINELTGIKESDTGLAPPALWDLAADKQTLQSEQPLQVARCTKIINADSEDPKYIINVKQFAKFVVDLSDQVAPTDIEEGMRVGVDRNKYQIHIPLPPKIDPTVTMMQVEEKPDVTYSDVGGCKEQIEKLREVVETPLLHPERFVNLGIEPPKGVLLFGPPGTGKTLCARAVANRTDACFIPVIGSELVQKYVGEGARMVRELFEMARTKKACLIFFDEIDAIGGARFDDGAGGDNEVQRTMLELINQLDGFDPRGNIKVLMATNRPDTLDPALMRPGRLDRKIEFSLPDLEGRTHIFKIHARSMSVERDIRFELLARLCPNSTGAEIRSVCTEAGMFAIRARRKIATEKDFLEAVNKVIKSYAKFSATPRYMTYN

SEQ ID NO: 1723 - protein, 433 aa, Homo sapiens; identical to SEQ ID NO: 1722

SEQ ID NO: 1724 - protein, 200 aa, Homo sapiens
MERTELLKPRTLADLIRILHELFAGDEVNVEEVQAVLEAYESNPAEWALYAKFDQYRYTRNLVDQGNGKFNLMILCWGEGHGSSIHDHTDSHCFLKLLQGNLKETLFDWPDKKSNEMIKKSERTLRENQCAYINDSIGLHRVENVSHTEPAVSLHLYSPPFDTCHAFDQRTGHKNKVTMTFHSKFGIRTPFTTSGSLENN

SEQ ID NO: 1725 - protein, 200 aa, Homo sapiens; identical to SEQ ID NO: 1724

SEQ ID NO: 1726 - protein, 424 aa, Homo sapiens
MSFPRGSQDRSVGNSSPWWPLTTEGSNGSQEAARLGEGDSPLGDVRNEELAKLEIAVLAVIFVVAVLGNSSVLLALHRTPRKTSRMHLFIRHLSLADLAVAFFQVLPQLCWDITYRFRGPDWLCRVVKHLQVFAMFASAYMLVVMTADRYIAVCHPLKTLQQPARRSRLMIATSWVLSFILSTPQYFIFSVIEIEVNNGTKTQDCWATFIQPWGTRAYVTWMTSGVFVAPVVVLGTCYGFICYHIWRNIRGKTASSRHSKGDKGSGEAVGPFHKGLLVTPCVSSVKSISRAKIRTVKMTFVIVSAYILCWAPFFIVQMWSVWDENFIWTDSENPSITITALLASLNSCCNPWIYMFFSGHLLQDCVQSFPCCHSMAQKFAKDDSDSMSRRQTSYSNNRSPTNSTGMWKDSPKSSKSIRFIPVST

SEQ ID NO: 1727 - protein, 205 aa, Homo sapiens
MALHMVLVVLSLLPLLEAQNPEPANITLGIPITNETLKWLSDKWFYMGAAFRDPVFKQAVQTIQTEYFYLTPNLINDTIELREFQTTDDQCVYNFTHLGVQRENGTLSKCAGAVKIFAHLIVLKKHGTFMLAFNLTDENRGLSFYAKKPDLSPELRKIFQQAVKDVGMDESEIVFVDWTKDKCSEQQKQQLELEKETKKETKKDP

SEQ ID NO: 1728 - protein, 240 aa, Homo sapiens
MVLELYLDLLSQPCRAIYIFAKKNNIPFQMHTVELRKGEHLSDAFAQVNPMKKVPAMKDGGFTLCESVAILLYLAHKYKVPDHWYPQDLQARARVDEYLAWQHTTLRRSCLRTLWHKVMFPVFLGEQIRPEMLAATLADLDVNVQVLEDQFLQDKDFLVGPHISLADVVAITELMHPVGGGCPVFEGRPRLAAWYRRVEAAVGKDLFLEAHEVILKVRDCPPADPVIKQKLMPRVLTMIQ

SEQ ID NO: 1729 - protein, 460 aa, Homo sapiens
MARTVVALNILVLLGLCWSLAVANPLPAAHETVAKGENGTKPDSDVIEHCSDAWSFDATTMDHNGTMLFFKGEFVWRGHSGIRELISERWKNPVTSVDAAFRGPDSVFLIKEDKVWVYPPEKKENGYPKLFQEESPGIPYPPDAAVECHRGECQSEGVLFFQGNRKWFWDFATRTQKERSWPAVGNCTAALRWLERYYCFQGNKFLRFNPVTGEVPPRYPLDARDYFISCPGRGHGKLRNGTAHGNSTHPMHSRCNADPGLSALLSDHRGATYAFSGSHYWRLDSSRDGWHSWPIAHHWPQGPSAVDAAFSWDEKVYLIQGTQVYVFLTKGGNNLVSGYPKRLEKELGSPPGISLDTIDAAFSCPGSSKLYVTSGRRLWWLDLKSGAQATWAELSWPHEKVDGALCLEKSLGPYSCSSNGPNLFFIHGPNLYCYSSIDKLNAAKSLPQPQKVNSILGCSQ

SEQ ID NO: 1730 - protein, 89 aa, Homo sapiens
MCDRKAVIKNADMSEEMQQDSVECATQALEKYNIEKDIAAHIKKEFDKKYNPTWHCIVGRNFGSYVTHETKHFIYFYLGQVAILLFKSG

SEQ ID NO: 1731 - protein, 603 aa, Homo sapiens
MALRTGGPALVVLLAFWVALGPCHLQGTDPGASADAEGPQCPVACTCSHDDYTDELSVFCSSKNLTHLPDDIPVSTRALWLDGNNLSSIPSAAFQNLSSLDFLNLQGSWLRSLEPQALLGLQNLYYLHLERNRLRNLAVGLFTHTPSLASLSLSSNLLGRLEEGLFQGLSHLWDLNLGWNSLVVLPDTVFQGLGNLHELVLAGNKLTYLQPALFCGLGELRELDLSRNALRSVKANVFVHLPRLQKLYLDRNLITAVAPRAFLGMKALRWLDLSHNRVAGLMEDTFPGLLGLHVLRLAHNAIASLRPRTFKDLHFLEELQLGHNRIRQLGERTFEGLGQLEVLTLNDNQITEVRVGAFSGLFNVAVMNLSGNCLRSLPERVFQGLDKLHSLHLEHSCLGHVRLHTFAGLSGLRRLFLRDNSISSIEEQSLAGLSELLELDLTTNRLTHLPRQLFQGLGHLEYLLLSYNQLTTLSAEVLGPLQRAFWLDISHNHLETLAEGLFSSLGRLRYLSLRNNSLQTFSPQPGLERLWLDANPWDCSCPLKALRDFALQNPGVVPRFVQTVCEGDDCQPVYTYNNITCAGPANVSGLDLRDVSETHFVHC

SEQ ID NO: 1732 - protein, 603 aa, Homo sapiens; identical to SEQ ID NO: 1731

SEQ ID NO: 1733 - protein, 603 aa, Homo sapiens; identical to SEQ ID NO: 1731

SEQ ID NO: 1734 - protein, 100 aa, Homo sapiens
MEHQQQQLRNLRDFLLVYNRMTELCFQRCVPSLHHRALDAEEEACLHSCAGKLIHSNHRLMAAYVHLMPALVQRRMADYEAASAVPGVPAEQPRDSPSGS

SEQ ID NO: 1735 - protein, 1079 aa, Homo sapiens
MEDEAVLDRGASFLKHVCDEEEVEGHHTIYIGVHVPKSYRRRRRHKRKAGHKEKKEKERISENYSDKSDVENADESSSSILKPLISPAAERIRFILGEEDDSPAPPQLFTELDELLAVDGQEMEWKETARWIKFEEKVEQGGERWSKPHVATLSLHSLFELRTCMEKGSIMLDREASSLPQLVEMIADHQIETGLLKPDLKDKVTYTLLRKHRHQTKKSNLRSLADIGKTVSSASRMFSNPDNGSPAMTHRNLTSSSLNDISDKPEKDQLKNKFMKKLPRDAEASNVLVGEVDFLDTPFIAFVRLQQAVMLGALTEVPVPTRFLFILLGPKGKAKSYHEIGRAIATLMSDEVFHDIAYKAKDRHDLIAGIDEFLDEVIVLPPGEWDPAIRIEPPKSLPSSDKRKNMYSGGENVQMNGDTPHDGGHGGGGHGDCEELQRTGRFCGGLIKDIKRKAPFFASDFYDALNIQALSAILFIYLATVTNAITFGGLLGDATDNMQGVLESFLGTAVSGAIFCLFAGQPLTILSSTGPVLVFERLLFNFSKDHSFDYLEFRLWIGLWSAFMCLILVATDASFLVQYFTRFTEEGFSSLISFIFIYDAFKKMIKLADYYPINSDFRVGYNTHFSCACLPPDPVNLSVSNDTTLAPEDLPTVSSTDMYHNATFDWAYLSKKECVKFGGKLVGNNCDFVPDITLMSFILFLGTYTSSMAMKKFKTSRYFPTTARKLISDFAIILSILIFCVIDALVGVDTPKLIVPSEFKPTSPHRGWFVPPFGGNPWWVCLAAAIPALLVTILIFMDQQITAVIVNRKEHKLKKGAGYHLDLFWVAILMVVCSFMALPWYVAATVISIAHIDSLKMETETSAPGEQPKFLGVREQRVTGTLVFILTGLSVFMAPILKFIPMPVLYGVFLYMGVASLNGVQFMDRLKLLLMPLKHQPDFIYLRHVPLRRVHLFTSLQVLCLALLWILKSTVAAIIFPVMILALVAVRKGMDYLFSQHDLSFLDDVIPEKDKKKKEDEKKKKKKKGSLDSDNDDSDCPYSEKVPSIKIPMDITEQQPFLSDNKPLDRERSSTFLERHTSC

SEQ ID NO: 1736 - protein, 219 aa, Homo sapiens
MSGLSGPLSWPGPLLSALLFLFLLGPSSVLGISFHLPVNSRKCLREEIHKDLLVTGAYEITDQSGGAGGLRTHLKITDSAGHILYAKEDATKGKFAFTTEDYDMFEVCFESKGTGRIPDQLVILDMKHGVEAKNYEEIAKVEKLKPLEVELRRLEDLSESIVNDFAYMKKREEEMRDTNESTNTRVLYFSIFSMFCLIGLATWQVFYLRRFFKAKKLIE

SEQ ID NO: 1737 - protein, 246 aa, Homo sapiens
MDAFIRVANQSQGRDRLFRATQHACMLLRYLLESKAGKEAVVTKLKNLETSVSTGRKWFRLGNVLHAIQATEQSIQATDLVPRLCLTLANLNRVVYYICDTVLWAKSVGLTSGINREKWQMRAARHYYYFLLLSLVRDLYEVLLHMGQVARDRAKREKSSGDPPKYSVANEESEWLQSFLLLLFQSLKRNPPLFLDTVKNFCDILIPLNQLGIYKSNLGVVGFGGLVSSVAGLITVVYPQLKLKAR

SEQ ID NO: 1738 - protein, 246 aa, Homo sapiens; identical to SEQ ID NO: 1737

SEQ ID NO: 1739 - protein, 812 aa, Homo sapiens
MDHKEIILLFLLFLKPGQGDSLDGYVSTQGASLHSLTKKQLAAGSIADCLAKCEGETDFICRSFQYHSKEQQCVIMAENSKTSSIIRMRDVILFEKRVYLSECKTGIGKGYRGTMSKTKTGVTCQKWSDTSPHVPKYSPSTHPSEGLEENYCRNPDNDEQGPWCYTTDPDQRYEYCNIPECEEECMYCSGEKYEGKISKTMSGLDCQSWDSQSPHAHGYIPAKFPSKNLKMNYCRNPDGEPRPWCFTTDPNKRWEYCDIPRCTTPPPPPGPTYQCLKGRGENYRGTVSVTASGKTCQRWSEQTPHRHNRTPENFPCKNLEENYCRNPDGETAPWCYTTDSQLRWEYCEIPSCGSSVSPDQSDSSVLPEQTPVVQECYQGNGKSYRGTSSTTNTGKKCQSWVSMTPHSHSKTPANFPDAGLEMNYCRNPDNDQRGPWCFTTDPSVRWEYCNLKRCSETGGGVAESAIVPQVPSAPGTSETDCMYGNGKEYRGKTAVTAAGTPCQEWAAQEPHSHRIFTPQTNPRAGLEKNYCRNPDGDVNGPWCYTMNPRKLYDYCNIPLCASLSSFECGKPQVEPKKCPGRVVGGCVANPHSWPWQISLRTRFSGQHFCGGTLISPEWVLTAAHCLEKSSRPEFYKVILGAHEERILGSDVQQIAVTKLVLEPNDADIALLKLSRPATITDNVIPACLPSPNYVVADRTLCYITGWGETKGTPGAGRLKEAQLPVIENKVCNRAEYLNNRVKSTELCAGHLAGGIDSCQGDSGGPLVCFEKDKYILQGVTSWGLGCARPNKPGVYVRVSRYVNWIEREMRND

SEQ ID NO: 1740 - protein, 581 aa, Homo sapiens [sequence omitted]

SEQ ID NO: 1741 - protein, 219 aa, Homo sapiens
MATLTVVQPLTLDRDVARAIELLEKPQESGEVPVHKLQSLKKVLQSEFCTAIREVYQYMHETITVNGCPEFRARATAKATVAAFAASEGHSHPRVVELPKTDEGLGFNVMGGKEQNSPIYISRIIPGGVAERHGGLKRGDQLLSVNGVSVEGEHHEKAVELLKAAKDSVKLVVRYTPKVLEEMEARFEKLRTARRRQQQQLLIQQQQQQQQQPQQNHMS

SEQ ID NO: 1742 - protein, 219 aa, Homo sapiens; identical to SEQ ID NO: 1741

SEQ ID NO: 1743 - protein, 219 aa, Homo sapiens; identical to SEQ ID NO: 1741

SEQ ID NO: 1744 - protein, 535 aa, Homo sapiens
MGFEDLLDKVGGFGPFQLRNLVLMALPRMLLPMHFLLPVFMAAVPAHHCALPGAPANLSHQDLWLEAHLPRETDGSFSSCLRFAYPQTVPNVTLGTEVSNSGEPEGEPLTVPCSQGWEYDRSEFSSTIATEWDLVCQQRGLNKITSTCFFIGVLVGAVVYGYLSDRFGRRRLLLVAYVSSLVLGLMSAASINYIMFVVTRTLTGSALAGFTIIVLPLELEWLDVEHRTVAGVISTVFWSGGVLLLALVGYLIRSWRWLLLAATLPCVPGIISIWWVPESARWLLTQGRVEEAKKYLLSCAKLNGRPVGEGSLSQEALNNVVTMERALQRPSYLDLFRTSQLRHISLCCMMVWFGVNFSYYGLTLDVSGLGLNVYQTQLLFGAVELPSKIMVYFLVRRLGRRLTEAGMLLGAALTFGTSLLVSLETKSWITALVVVGKAFSEAAFTTAYLFTSELYPTVLRQTGLGLTALMGRLGASLARLAALLDGVWLLLPKVAYGGIALVAACTALLLPETKKAQLPETIQDVERKSTQEEDV

SEQ ID NO: 1745 - protein, 412 aa, Homo sapiens
MKAARFVMRSASSLGNAGLVPREVELFSRYSPSPLSMKQLLDFGSENACERTSFSFLRQELPVRLANILKEIDILPEHLVNTPSVQLVKSWYIQSLMDLVEFHEKSPEDQKVLSDFVDTLVKVRNRHHNVVPTMAQGILEYKDNCTVDPVTNQNLQYFLDRFYMNRISTRMLMNQHILIFSDSKTGNPSHIGSIDPNCDVVAVVEDAFECAKMLCDQYYLTSPELKLTQVNGKFPGQPIHIVYVPSHLHHMLFELFKNAMRATVEHQENRPFLTPVEATVVLGKEDLTIKISDRGGGVPLRITDRLFSYTYSTAPTPVMDNSRNAPLAGFGYGLPISRLYAKYFQGDLNLYSMSGYGTDAIIYLKALSSESIEKLPVFNKSAFKHYQMSSEADDWCIPSKEPKNLSKEKLAV

SEQ ID NO: 1746 - protein, 224 aa, Homo sapiens
MPGGLLLGDEAPNFEANTTIGHIRFHDFLGDSWGILFSHPRDFTPVCTTELGRAAKLAPEFAKRNVKLIALSIDSVEDHFAWSKDINAYNGAAPTEKLPFPIIDDKDRDLAILLGMLDPAEKDEKGMPVTARVVFIFGPDKKLKLSILYPATTGRNFDEILRVVDSLQLTASNPVATPVDWKKGESVMVLPTLPEEEAKQLFPKGVFTKELPSGKKYLRYTPQP

SEQ ID NO: 1747 - protein, 240 aa, Homo sapiens
MLSTAAYRDPDRELVMGPQGSAGPVQMRFSPYAFNGGTVLAIAGEDFSIVASDTRLSEGFSIHTRDSPKCYKLTDKTVIGCSGFHGDCLTLTKIIEARLKMYKHSNNKAMTTGAIAAMLSTILYSRRFFPYYVYNIIEGLDEEGKGAVYSFDPVGSYQRDSFKAGGSASAMLQPLLDNQVGFKNMQNVEHVPLTLDRAMRLVKDVFISAAERDVYTGDALRICIVTKEGIREETVPLRKD

SEQ ID NO: 1748 - protein, 754 aa, Homo sapiens
MMSSYKRATLDEEDLVDSLSEGDVYPNGLQVNFRSPRSGQRCWAARTSVEKRLVVLVTLLAAGLVACLAALGIQYRTRTPPVCLTEACVSVTSSILNSMDPTVDPCQDFFSYACGGWIKANPVPDGHSRWGTFSNLWEHNQAIIKHLLENSTASASEAEKKAQVYYRACMNETRIEELRAKPLMELIEKLGGWNITGPWAKDNFQDTLQVVTAHYRTSPFFSVYVSADSKNSNSNVIQVDQSGLGLPSRDYYLNKTENEKVLTGYLNYMVQLGKLLGGGDEDSIRPQMQQILDFETALANITIPQEKRRDEELIYHKVTAAELQTLAPAINWLPFLNAIFYPVEINESEPIVVYDKEYLRQVSTLINSTDKCLLNNYMMWNLVRKTSSFLDQRFQDADEKFMEVMYGTKKTCLPRWKFCVSDTENNLGFALGPMFVKATFAEDSKNIASEIILEIKKAFEESLSTLKWMDEDTRRSAKEKADAIYNMIGYPNFIMDPKELDKVFNDYTAVPDLYFENAMRFFNFSLRVTADQLRKAPNRDQWSMTPPMVNAYYSPTKNEIVFPAGILQAPFYTRSSPNALNFGGIGVVVGHELTHAFDDQGREYDKDGNLRPWWKNSSVEAFKQQTECMVQQYNNYSVNGEPVNGRHTLGENIADNGGLKAAYRAYQNWVKKNGAEQILPTLGLTSNQLFFLGFAQVWCSVRTPESSHEGLITDPHSPSRFRVIGSLSNSKEFSEHFRCPLGSPMNPRHKCEVW

SEQ ID NO: 1749 - protein, 683 aa, Homo sapiens
MLFIFNFLFSPLPTPALICLLTFGTAIFLWLINRPQPVLPLIDLDNQSVGIEGGARRGAFQKNNDLILYYFSDAKTLYEVFQRGLAVSDNGPCLGYRKPNQPYKWISYKQVSDRAEYLGSCLLHKGYKPSQDQFIGIFAQNRPEWVISELACYTYSMVAVPLYDTLGAEAIIYVINRADISVVICDTPQKATMLIENVEKDLTPGLKTVILMDPFDDDLMKRGEKCGIEMLSLHDAENLGKENFKKPMPPNPEDLSVICFTSGTTGDPKGAMLTHQNIVSNMAAFLKFLEPIFQPTPEDVTISYLPLAHMFERLVQGVIFSCGGKIGFFQGDIRLLPDDMKALKPTVFPTVPRLLNRVYDKVQNEAKTPLKKFLLNLAIISKFNEVRNGIIRRNSLWDKLVFSKIQSSLGGKVRLMITGAAPISTPVLTFFRAAMGCWVFEAYGQTECTAGCSITSPGDWTAGHVGTPVSCNFVKLEDVADMNYFSVNNEGEICIKGNNVFKGYLKDPEKTQEVLDKDGWLHTGDIGRWLPNGTLKIIDRKKNIFKLAQGEYIAPEKIENVYSRSRPILQVFVHGESLRSFLIGVVVPDPESLPSFAAKIGVKGSFEELCQNQCVKKAILEDLQKVGKEGGLKSFEQVKSIFVHPEPFSIENGLLTPTLKAKRVELAKFFQTQIKSLYESIEE

SEQ ID NO: 1750 - protein, 80 aa, Homo sapiens
MATLPPTAHTSQQPVNIEDEDGILDEYDQYSLAQSYVVGGGRKGRTKREAAANTNRPSPGGHERKLLTKFQNSERKKAWR

SEQ ID NO: 1751 - protein, 670 aa, Homo sapiens
MAKRIKAKPTSDKPGSPYRSVTHFDSLAVIDIPGADTLDKLFDHAVAKFGKKDSLGTREILSEENEMQPNGKVFKKLILGNYKWINYLEVNCRVNNFGSGLTALGLKPKNTIAIFCETRAEWMIAAQTCFKYNFPLVTLYATLGKEAVVHGLNESEASYLITSVELLESKLKAALLDINCVKHIIYVDNKTINRAEYPEGLEIHSMQSVEELGSKPENSSIPPSRPTPSDMAIVMYTSGSTGRPKGVMMHHSNLIAGMTGQCERIPGLGPKDTYIGYLPLAHVLELTAEISCFTYGCRIGYSSPLTLSDQSSKIKKGSKGDCTVLKPTLMAAVPEIMDRIYKNVMSKVQEMNYIQKTLFKIGYDYKLEQIKKGYDAPLCNLILFKKVKALLGGNVRMMLSGGAPLSPQTHRFMNVCFCCPIGQGYGLTESCGAGTVTEVTDYTTGRVGAPLICCEIKLKDWQEGGYTVHDKPNPRGEIVIGGQNISMGYFKNEEKTAEDYSVDENGQRWFCTGDIGEFHPDGCLQIIDRKKDLVKLQAGEYVSLGKVEAALKNCPLIDNICAFAKSDQSYVISFVVPNQKKLTLLAQQKGVEGSWVDICNNPAMEAEILKEIREAANAMKLERFEIPIKVRLSPEPWTPETGLVTDAFKLKRKELKNHYLKDIERMYGGK

SEQ ID NO: 1752 - protein, 670 aa, Homo sapiens; identical to SEQ ID NO: 1751

SEQ ID NO: 1753 - protein, 269 aa, Homo sapiens
MADHMMAMNHGRFPDGTNGLHHHPAHRMGMGQFPSPHHHQQQQPQHAFNALMGEHIHYGAGNMNATSGIRHAMGPGTVNGGHPPSALAPAARFNNSQFMGPPVASQGGSLPASMQLQKLNNQYFNHHPYPHNHYMPDLHPAAGHQMNGTNQHFRDCNPKHSGGSSTPGGAGGSGTPGGSGGTSGGAGGSSAGGSGGGSTMPASVAHVPAAMLPPNVIDTDFIDEEVLMSLVIEMGLDRIKELPELWLGQNEFDFMTDFVCKQQPSRVSC

SEQ ID NO: 1754 - protein, 269 aa, Homo sapiens; identical to SEQ ID NO: 1753

SEQ ID NO: 1755 - protein, 271 aa, Homo sapiens
MVLIKEFRVVLPCSVQEYQVGQLYSVAEASKNETGGGEGIEVLKNEPYENDGEKGQYTHKIYHLKSKVPAFVRMIAPEGSLVFHEKAWNAYPYCRTIVTNEYMKDDFFIKIETWHKPDLGTLENVHGLDPNTWKTVEIVHIDIADRSQVEPADYKADEDPALFQSVKTKRGPLGPNWKKELANTPDCPKMCAYKLVTIKFKWWGLQSKVENFIQKQEKRIFTNLHRQLFCWIDKWIDLTMEDIRRMEDETQKELETMRKKGSVRGTSAADA

SEQ ID NO: 1756 - protein, 333 aa, Homo sapiens
MVSGSSGLAAARLLSRTFLLQQNGIRHGSYTASRKNIYIDKNTKVICQGFTGKQGTFHSQQALEYGTKLVGGTTPGKGGKKHLGLPVFNTVKEAKEKTGATASVIYVPPPFAAAAINEAIDAEIPLVVCITEGIPQQDMLRVKHKLTRQGKTRLIGPNCPGIINPGECKIGIMPGHIHKKGRIGIVSRSGTLTYEAVHQTTQVGLGQSLCIGIGGDPFNGTNFIDCLDVFLKDPATEGIVLIGEIGGHAEENAAEFLKEHNSGPKAKPVVSFIAGITAPPGRRMGHAGAIIAGGKGGAKEKISALQSAGVIVSMSPAQLGTCMYKEFEKRKML

SEQ ID NO: 1757 - protein, 722 aa, Homo sapiens
MEKNGNNRKLRVCVATCNRADYSKLAPIMFGIKTEPAFFELDVVVLGSHLIDDYGNTYRMIEQDDFDINTRLHTIVRGEDEAAMVESVGLALVKLPDVLNRLKPDIMIVHGDRFDALALATSAALMNIRILHIEGGEVSGTIDDSIRHAITKLAHYHVCCTRSAEQHLISMCEDHDRILLAGCPSYDKLLSAKNKDYMSIIRMWLGDDVKCKDYIVALQHPVTTDIKHSIKMFELTLDALISFNKRTLVLFPNIDAGSKEMVRVMRKKGIEHHPNFRAVKHVPFDQFIQLVAHAGCMIGNSSCGVREVGAFGTPVINLGTRQIGRETGENVLHVRDADTQDKILQALHLQFGKQYPCSKIYGDGNAVPRILKFLKSIDLQEPLQKKFCFPPVKENISQDIDHILETLSALAVDLGGTNLRVAIVSMKGEIVKKYTQFNPKTYEERISLILQMCVEAAAEAVKLNCRILGVGISTGGRVNPQEGVVLHSTKLIQEWNSVDLRTPLSDTLHLPVWVDNDGNCAAMAERKFGQGKGQENFVTLITGTGIGGGIIHQHELIHGSSFCAAELGHLVVSLDGPDCSCGSHGCIEAYASGMALQREAKKLHDEDLLLVEGMSVPKDEAVGALHLIQAAKLGNVKAQSILRTAGTALGLGVVNILHTMNPSLVILSGVLASHYIHIVRDVIRQQALSSVQDVDVVVSDLVDPALLGAASMVLDYTTRRIH

SEQ ID NO: 1758 - protein, 434 aa, Homo sapiens
MRLARLLRGGTSVRPLCAVPCASRSLASDSASGSGPASESGVPGQVDFYARFSPSPLSMKQFLDFGSVNACEKTSFMFLRQELPVRLANIMKEISLLPDNLLRTPSVQLVQSWYIQSLQELLDFKDKSAEDAKTIYEFTDTVIRIRNRHNDVIPTMAQGVTEYKESFGVDPVTSQNVQYFLDRFYMSRISIRMLLNQHSLLFGGKGSPSHRKHIGSINPNCDVVEVIKDGYENARRLCDLYYVNSPELELEELNAKSPGQPIQVVYVPSHLYHMVFELFKNAMRATMEHHADKGVYPPIQVHVTLGEEDLTVKMSDRGGGVPLRKIDRLFNYMYSTAPRPRVETSRAVPLAGFGYGLPISRLYAQYFQGDLKLYSLEGYGTDAVIYIKALSTESIERLPVYNKAAWKHYRTNHEADDWCVPSREPKDMTTFRSS

SEQ ID NO: 1759 - protein, 267 aa, Homo sapiens
MTLETQMFQNAHSGSQWLLPPLTMLLLFAFADRQTGDLLKAVVKRDPPWIQVLKDDTVTLTCEGTHNPGNSSTQWFHNQSSTWGQVQASYTFKATVNDSGEYRCRMAHTSLSDPVHLEVISDWLLLQTPQLVFLEGERITLRCHGWKSIQLARISFLQNGEFVSFHPYNVSYSISNANHSHSGDYYCKAYLGRTEHVSKPVTITVQGSATASTSSLVWFHAAFCLVMCLLFAVDTGLYFCVRRNLQTSGEDWRRSLSVGKYKAPQDK

SEQ ID NO: 1760 - protein, 267 aa, Homo sapiens; identical to SEQ ID NO: 1759

SEQ ID NO: 1761 - protein, 117 aa, Homo sapiens
MSAGSSCSQTPSRAIPTRRVALGDGVQLPPGDYSTTPGGTLFSTTPGGTRIIYDRKFLMECRNSPVAKTPPKDLPTIPGVTSPTSDEPPMQASQSHLHSSPEDKRAGGEESQFEMDI

SEQ ID NO: 1762 - protein, 117 aa, Homo sapiens; identical to SEQ ID NO: 1761

SEQ ID NO: 1763 - protein, 316 aa, Homo sapiens
MLSLSNLQNIIYNPTIPYVSTITEQLKPGSLIVIRGHVPKDSERFQVDFQHGNSLKPRADVAFHFNPRFKRSNCIVCNTLTNEKWGWEEITHDMPFRKEKSFEIVIMVLKNKFQVAVNGKHILLYAHRINPEKIDTLGIYGKVNIHSIGFRFSSDLQSMETSTLGLTQISKENIQKSGKLHLSLPFEARLNASMGPGRTVVVKGEVNTNAKSFNVDLVAGRSRDIALHLNPRLNVKAFVRNSFLQDAWGEEERNITCFPFSSGMYFEMIIYCDVREFKVAVNGVHSLEYKHRFKDLSSIDTLAVDGDIRLLDVRSW

SEQ ID NO: 1764 - protein, 647 aa, Homo sapiens
MHCMSGHSNFVSCVCIIPSSDIYPHGLIATGGNDHNICIFSLDSPMPLYILKGHKDTVCSLSSGKFGTLLSGSWDTTAKVWLNDKCMMTLQGHTAAVWAVKILPEQGLMLTGSADKTIKLWKAGRCERTFSGHEDCVRGLAILSETEFLSCANDASIRRWQITGECLGVYYGHTNYIYSISVFPNCRDFVTTAEDRSLRIWKHGECAQTIRLPAQSIWCCCVLDNGDIVVGASDGIIRVFTEADERTASAEEIKAFERELSQATIDSKTGDLGDINAEQLPGREHLNEPGTREGQTRLIRDGERVEAYQWSVSDGRWIKIGDVVGSSGANQQTSGKVLYEGKEFDYVFSIDVNEGGPSYKLPYNVSDDPWLVAYNFLQKNDLNPMFLDQVAKFIIDNTKGQTLGLGNTSFSDPFTGGGRYVPGTSGPSNTVQTADPFTGAGRYMPGSAGMDTTMAGVDPFTGNSAYRSAAFKTVNIYFPKKEALTFDQANPTQILGKLKELNGSAPEEKKLTEDDLVLLEKILSLICGNASEKPTAQQLQVLWKAINWPEDIVFPALDILRLSIKHPSVNENFCNEKEGDQFSSHLINLLNPKGKPANQLLALRTFCNCFVSQAGQKLMMSQRESLMSHAIELKSGSNKNIILLWLH

SEQ ID NO: 1765 - protein, 464 aa, Homo sapiens
MEPSPLELPVDAVRRIAAELNCDPTDERVALRLDEEDKLKRFKDCFYIPKMRDLPSIDLSLVNEDDNAIYFLGNSLGLQPKMVKTYLEEELDKWAKIGAYGHEVGKRPWIIGDESIVTLMKDIVGAHEKEIALMNALTVNLHLLLLSFFKPTPKRHKILLEAKAFPSDHYAIESQIQLHGLDVEKSMRMIKPREGEETLRMEDILEVIEKEGDSIAVVLFSGLHFYTGQLFNIPAITQAGHAKGCFVGFDLAHAVGNVELHLHDWDVDFACWCSYKYLNSGAGGLAGAFIHEKHAHTIKPALVGWFGHELSTRFNMDNKLQLIPGVNGFRISNPPILLVCSLHASLEIFQQATMTALRRKSILLTGYLEYLLKHYHGGNDTENKRPVVNIITPSRAEERGCQLTLTFSISKKGVFKELEKRGVVCDKREPEGIRVAPVPLYNSFHDVYKFIRLLTAILDSTERN

SEQ ID NO: 1766 - protein, 1505 aa, Homo sapiens
MAYNWQTEPNRAEPQEGGHDHQQCHHADQHLSSRQVRLGFDQLVEELSNKTPLPEDEKEGTCFVPDTPNLDSKWQSIYGPHPRHFNEFTSQSPHFSQLPFGKASAIGFNPAVLPAHQFIHEGASWRNPTRKYHGGEDPRFSALTPSSTGLDKCHQQGQSGTEHCNYYVEPENNVPHHYSPYSMDSIPDSEEKGSGDADLVEPSLVFSKDSFLPRASENMSVESTEPIGCPLEIVEAPQGSNKSLASFCNNVTKIRGLYHASDTNSNSGKIWAITTAYPSRLFADTQFRVKISTDNSAQLLLLKPPANYLVKDLIAEILLLCANEQLSPKEYLLSICGSEEFLQTDHCLGSHKIFQKSKSVIQLHLQRSRDTPGKLSRKRDDDRSRVHLNQLLEFTHIWKISRQCLSTVMKSYNLHVEHLLKTQEDVEEKPLSSMFSCGRHPPQPHGNDIIEDVRNICSVLGCIETKQVSDAVKELTLILQRPSQNFHQNSETSKKGFIENVTSELSRSLHQLVDVYCSSFCTDFRPARAPGGVSRDHAGLHSHLSFTVCSLHNVPETWAHSYKAFSFSCWLTYAGKKLCQVKSCRSLPVTKSFSFSVNWNEIINFPLEIKSLPRESMLVIKLFGIDSATHSANLLAWTCLPLFPKEKSPLGSRLLSMTLQSEPPIEMMAPGVWDGSQPTPLTLQIDFPAATWEYVKPETEENRTDHQEPPRECLKHIARLSQKQPPLLLSVEKRRYLWFYRFYCNNENSSLPLVLGSAPGWDEGTVSEMHAVLRRWTFSHPLEALGLLTSRFPDQDIREVAVQQLDNFLTDELLDCLPQLVQAVKFEWSLESPLVELLLHRSLQSIRVAHRLFWLLRDAQGEDYFKSWYQELLAALQFCAGEALIEELSKEQKLVKLLGDIGEKVKSAGDAQRKDVLKKEIGSLEEFFKDIKTCHLPLNPALCVKGIDRDACSYFTSNALPLKITFINANPMGKNISVIFKAGDDLRQDMLVLQIIQVMDNVWLQEGLDMQMIIYGCLATGKAQGFIEMVPDAVTLAKIHLHSGLIGPLKENTIKKWFSQHNHLKEDYEKALRNFFYSCAGWCVVTFILGVCDRHNDNIMLTKSGHMFHIDFGKFLGHAQTFGGIKRDRAPFIFTSEMEYFITEGGKNTQHFQDFVELCCRAYNIVRKHSQLLLSLLEMMLHAGLPELRGIEDLKYVHDNLRPQDTDLEATSHFTTKIKQSLECFPVKLNNLIHTLAQMPAFSLARPAPQTPPQECCVLNKTRTIQRVTILGFSKTHSNLYLIEVTRSDNRKNLAKKSFEQFYRLHSQIQKQFPLLTLPEFPHWWHLPFTDSHHERIRDLSHYVEQVLHGSYEVANSDCVLSFFLSEHIQQTLEDSPFVDPGDHSPDKSPQVQLLMTYEDTKLTILVKHLKNIHLPDGSAPSAHVEIYLLPHPSEVRRKKTKCVPKCTDPTYNEIVVYDDVSGLQGHVLMLIVKSKTVFVGAVNIQLCSVPLNEEKWYPLGNSII

SEQ ID NO: 1767 - protein, 363 aa, Homo sapiens
MAAQESLHVKTPLRDTMALSKVAGTSVFLKMDSSQPSGSFKIRGIGHLCKMKAKQGCKHFVCSSVVQIWGSRMRGRSHSGDEQPHVRSQALLPDTPSPLTAGNAGMATAYAARRLGLPATIVVPSTTPALTIERLKNEGATVEVVGEMLDEAIQLAKALEKNNQGWVYISPFDDPLIWEGHTSLVKELKETLSAKPGAIVLSVGGGGLLCGVVQGLREVGWEDVPIIAMETFGAHSFHAAVKEGKLVTLPKITSVAKALGVNTVGAQTLKLFYEHPIFSEVISDQEAVTAIEKFVDDEKILVEPACGAALAAVYSGVVCRLQAEGRLQTPLASLVVIVCGGSNISLAQLQALKAQLGLNELLK

SEQ ID NO: 1768 - protein, 363 aa, Homo sapiens; identical to SEQ ID NO: 1767

SEQ ID NO: 1769 - protein, 363 aa, Homo sapiens; identical to SEQ ID NO: 1767

SEQ ID NO: 1770 - protein, 301 aa, Homo sapiens
MAEEPKPISPLKNLLAGGFGGVCLVFVGHPLDTVKVRLQTQPPSLPGQPPMYSGTIDCFRKTLFREGITGLYRGMAAPIIGVTPMFAVCFFGFGLGKRLQQKSPEDELTYPQLFTAGMLSGVFTTGIMTPGERIKCLLQIQASSGKNKYSGTLDCAKKLYQEFGIRGFYKGTVLTLMRDVPASGMYFMTYEWLKNLFTPQGKSVHDLSVPRVLVAGGFAGIFNWVVAIPPDVLKSRFQTAPPGKYPNGFRDVLRELIREEGVTSLYKGFNAVMIRAFPANAACFLGFEIAMKILNWIAPNL

SEQ ID NO: 1771 - protein, 297 aa, Homo sapiens
MAGEKAEKPDKKEQKPAAKKAGGDATAPRAGAWCVKKSSSKAKKLRKSKPHCSRNPVLVRGIGRYSRSAMYSRKALYKRKYSAAKTKVEKKKKKEKVLATVTKTVGGDKNGGTRVVKLRKMPRYYPTEDVPRKLLSHGKKPFSQHVRRLRSSITPGTVLIILTGRHRGKRVVFLKQLGSGLLLVTGPLALNRVPLRRTHQKFVIATSTKVDISKVKIPKHLTDAYFKKKPLRKPRHQEGEIFDTEKEKYEITEQRKADQKAVDSQILPKIKAVPQLQGYLRSQFSLTNGMYPHKLVF

SEQ ID NO: 1772 - protein, 297 aa, Homo sapiens; identical to SEQ ID NO: 1771

SEQ ID NO: 1773 - protein, 313 aa, Homo sapiens
MPNTAMKKKVLLMGKSGSGKTSMRSIIFANYIARDTRRLGATIDVEHSHVRFLGNLVLNLWDCGGQDTFMENYFTSQRDNIFRNVEVLIYVFDVESRELEKDMHYYQSCLEAILQNSPDAKIFCLVHKMDLVQEDQRDLIFKEREEDLRRLSRPLECACFRTSIWDETLYKAWSSIVYQLIPNVQQLEMNLRNFAQIIEADEVLLFERATFLVISHYQCKEQRDVHRFEKISNIIKQFKLSCSKLAASFQSMEVRNSNFAAFIDIFTSNTYVMVVMSDPSIPSAATLINIRNARKHFEKLERVDGPKHSLLMR

SEQ ID NO: 1774 - protein, 217 aa, Homo sapiens
MATVEPETTPTTNPPPAEEEKTESNQEVANPEHYIKHPLQNRWALWFFKNDKSKTWQANLRLISKFDTVEDFWALYNHIQLSSNLMPGCDYSLFKDGIEPMWEDEKNKRGGRWLITLNKQQRRSDLDRFWLETLLCLIGESFDDYSDDVCGAVVNVRAKGDKIAIWTTECENRDAVTHIGRVYKERLGLPPKIVIGYQSHADTATKSGSTTKNRFVV

SEQ ID NO: 1775 - protein, 136 aa, Homo sapiens
MARTKQTARKSTGGKAPRKQLATKAARKSAPSTGGVKKPHRYRPGTVALREIRRYQKSTELLIRKLPFQRLVREIAQDFKTDLRFQSAAIGALQEASEAYLVGLFEDTNLCAIHAKRVTIMPKDIQLARRIRGERA

SEQ ID NO: 1776 - protein, 363 aa, Homo sapiens
MSATIEREFEELDAQCRWQPLYLEIRNESHDYPHRVAKFPENRNRNRYRDVSPYDHSRVKLQSAENDYINASLVDIEEAQRSYILTQGPLPNTCCHFWLMVWQQKTRAVVMLNRTVEKESVKCAQYWPTDDREMVFKETGFSVKLLSEDVKSYYTVHLLQLENINSGETRTISHFHYTTWPDFGVPESPASFLNFLFKVRESGSLNPDHGPAVIHCSAGIGRSGTFSLVDTCLVLMEKGEDVNVKQILLSMRKYRMGLIQTPDQLRFSYMAIIEGAKYTKGDSNIQNRTMTEKYNGKRIGSEDEKLTGLSSKVPDTVEESSESILRKRIREDRKATTAQKVQQMRQRLNETERKRKRPRLTDT

SEQ ID NO: 1777 - protein, 344 aa, Homo sapiens
MMLAARLSRPLSQLPGKALSVCDRENGTRHTLLFYPASFSPDTRRTYTSQADAASGKAVLVTGCDSGFGFSLAKHLHSKGFLVFAGCLLKEQGDAGVRELDSLKSDRLRTIQLNVCNSEEVEKAVETVRSGLKDPEKGMWGLVNNAGISTFGEVEFTSMETYKEVAEVNLWGTVRTTKSFLPLLRRAKGRVVNISSMLGRMANPARSPYCITKFGVEAFSDCLRYEMHPLGVKVSVVEPGNFIAATSLYSPERIQAIAKKMWDELPEVVRKDYGKKYFDEKIAKMETYCNSGSTDTSSVINAVTHALTAATPYTRYHPMDYYWWLRMQVMTHFPGAISDKIYIH

SEQ ID NO: 1778 - protein, 447 aa, Homo sapiens
MAGAGGGNDIQWCFSQVKGAVDDDVAEADIISTVEFNHSGELLATGDKGGRVVIFQQEQENKIQSHSRGEYNVYSTFQSHEPEFDYLKSLEIEEKINKIRWLPQKNAAQFLLSTNDKTIKLWKISERDKRPEGYNLKEEDGRYRDPTTVTTLRVPVFRPMDLMVEASPRRIFANAHTYHINSISINSDYETYLSADDLRINLWHLEITDRSFNIVDIKPANMEELTEVITAAEFHPNSCNTFVYSSSKGTIRLCDMRASALCDRHSKLFEEPEDPSNRSFFSEIISSISDVKFSHSGRYMMTRDYLSVKVWDLNMENRPVETYQVHEYLRSKLCSLYENDCIFDKFECCWNGSDSVVMTGSYNNFFRMFDRNTKRDITLEASRENNKPRTVLKPRKVCASGKRKKDEISVDSLDFNKKILHTAWHPKENIIAVATTNNLYIFQDKVN

SEQ ID NO: 1779 - protein, 478 aa, Homo sapiens
MARCCFYTAGTLSLLLLVTSVTLLVARVFQKAVDQTIEKNMVLQNGTKVFDSWEKPPLPVYIQFYFFNVTNPEEILQGEIPLLEEVGPYTYRELRNKANVQFGENGTTISAVTNKAYIFERNQSVGDPTVDLIRTINIPLLTVVEMAQQPFLREIIEAMLKAYQQTLFVTHTVHELLWGYKDEVLSLVHIFRPDVSPNFGLFYERNGTNDGEYVFLTGEDNYLNFTKIVEWNGKTSLDWWTTDTCNMINGTDGDSFHPLISKDETLYIFPSDFCRSVYITFSSFENVEGLPAFRYKVPAEILANSSENAGFCIPEGNCMDAGVLNVSICKNGAPIIMSFPHFYQADEKFVSAIKGMRPNKEEHESFVDINPLTGIILRGAKRFQINTYVKKLDDFVETGNIRTMVFPVMYLNESVLIDKETASQLKSVINTTLIVTNIPYIIMALGVFFGLIFTWLACRGQGSTDEGTADERAPLIRT

SEQ ID NO: 1780 - protein, 478 aa, Homo sapiens; identical to SEQ ID NO: 1779

SEQ ID NO: 1781 - protein, 238 aa, Homo sapiens
MAAALAVRGAVSAPAFGPEALTPDWENREVSTGTTIMAVQFDGGVVLGADSRTTTGSYIANRVTDKLTPIHDHIFCCRSGSAADTQAVADAVTYQLGFHSIELNEPPLVHTAASLFKEMCYRYREDLMAGIIIAGWDPQEGGQVYSVPMGGMMVRQSFAIGGSGSSYIYGYVDATYREGMTKDECLQFTANALALAMERDGSSGGVIRLAAIQQSGVERQVLLGDQIPKVTISTLPPP

SEQ ID NO: 1782 - protein, 674 aa, Homo sapiens
MPPPPGPTAALGTALLLLLLASESSHTVLLRAREAAQFLRPRQRRAYQVFEEAKQGHLERECVEEVCSKEEAREVFENDPETDYFYPRYQECMRKYGRPEDKNPNFATCVKNLPDQCTPNPCDKKGTQLCQDLMGNFFCLCKDGWGGRLCDKDVNECSQKNGGCSQVCHNKPGSFQCACHSGFSLQSDNKSCQDIDECTDSDTCGDARCKNLPGSYSCLCDKGYTYSSKEKTCQDVDECQQDRCEQTCVNSPGSYTCHCNGRGGLKLSPDMDTCEDILPCVPFSMAKSVKSLYLGRMFSGTPVIRLRFKRLQPTRLLAEFDFRTFDPEGVLFFAGGRSDSTWIVLGLRAGRLELQLRYNGVGRITSSGPTINHGMWQTISVEELDRNLVIKVNKDAVMKIAVAGGLFQLERGLYHLNLTVGGIPFKESDLVQPINPRLDGCMRSWNWLNGEDSAIQETVKANTKMQCFSVTERGSFFPGNGFAFYSLNYTRTSLDVGTETTWEVEVVARIRPATDTGVLMALVGDKDVVLLSVALVDYHSTKKLKKQLVVLAVENVALALMEIKVCDSQEHTVTVSLRDGEATLEVDGTKGQSEVSTAQLQERLDLLKTRLQGSVLTFVGGLPDVQVTSTPVTAFYRGCMTLEVNGKTLDLDTASYKHSDITSHSCPPVEHVTA

SEQ ID NO: 1783 - protein, 288 aa, Homo sapiens
MSDSGEQNYGERESRSASRSGSAHGSGKSARHTPARSRSKEDSRRSRSKSRSRSESRSRSRRSSRRHYTRSRSRSRSHRRSRSRSYSRDYRRRHSHSHSPMSTRRRHVGNRANPDPNCCLGVFGLSLYTTERDLREVFSKYGPIADVSIVYDQQSRRSRGFAFVYFENVDDAKEAKERANGMELDGRRIRVDFSITKRPHTPTPGIYMGRPTYGSSRRRDYYDRGYDRGYDDRDYYSRSYRGGGGGGGGWRAAQDRDQIYRRRSPSPYYSRGGYRSRSRSRSYSPRRY

SEQ ID NO: 1784 - protein, 418 aa, Homo sapiens
MEEIGILVEKIQDEIPALSVSRPQTGLSFLGPEPEDLEDLYSRYKKLQQELEFLEVQEEYIKDEQKNLKKEFLHAQEEVKRIQSIPLVIGQFLEAVDQNTAIVGSTTGSNYYVRILSTIDRELLKPNASVALHKHSNALVDVLPPEADSSIMMLTSDQKPDVMYADIGGMDIQKQEVREAVELPLTHFELYKQIGIDPPRGVLMYGPPGCGKTMLAKAVAHHTTAAFIRVVGSEFVQKYLGEGPRMVRDVFRLAKENAPAIIFIDEIDAIATKRFDAQTGADREVQRILLELLNQMDGFDQNVNVKVIMATNRADTLDPALLRPGRLDRKIEFPLPDRRQKRLIFSTITSKMNLSEEVDLEDYVARPDKISGADINSICQESGMLAVRENRYIVLAKDFEKAYKTVIKKDEQEHEFYK

SEQ ID NO: 1785 - protein, 440 aa, Homo sapiens
MGQSQSGGHGPGGGKKDDKDKKKKYEPPVPTRVGKKKKKTKGPDAASKLPLVTPHTQCRLKLLKLERIKDYLLMEEEFIRNQEQMKPLEEKQEEERSKVDDLRGTPMSVGTLEEIIDDNHAIVSTSVGSEHYVSILSFVDKDLLEPGCSVLLNHKVHAVIGVLMDDTDPLVTVMKVEKAPQETYADIGGLDNQIQEIKESVELPLTHPEYYEEMGIKPPKGVILYGPPGTGKTLLAKAVANQTSATFLRVVGSELIQKYLGDGPKLVRELFRVAEEHAPSIVFIDEIDAIGTKRYDSNSGGEREIQRTMLELLNQLDGFDSRGDVKVIMATNRIETLDPALIRPGRIDRKIEFPLPDEKTKKRIFQIHTSRMTLADDVTLDDLIMAKDDLSGADIKAICTEAGLMALRERRMKVTNEDFKKSKENVLYKKQEGTPEGLYL

SEQ ID NO: 1786 - protein, 260 aa, Homo sapiens
MSSSQSGVCPCQGSASHPTILYTLLSPGPRTRPMAPASRSHCLCQQHRPVRLCAPHRTCREALDVLGKTVAFLRNLPSFCLLPHEDQRRLLEGCWGPLFLLGLAQDTVTFEVAEAPVPSILKKILLEEPNSGAQGAQPPDPPQPSLAAVQWLQHCLESFWSLELGPKEYAYLKGTILFNPDVPGLHASCHIAHLQQEAHWALCEVLEPWYPASQGRLARILLMASTLKNISCTLLVDLFFRPVIGDVDITELLEDMLLLR

SEQ ID NO: 1787 - protein, 260 aa, Homo sapiens; identical to SEQ ID NO: 1786

SEQ ID NO: 1788 - protein, 230 aa, Homo sapiens
MTTNMLPLHPYWPRHLRLDNFVPNDLPTWHILVGLFSFSGVLIVITWLLSSRVSVVPLGTGRRLALCWFAVCTFIHLVIEGWFSFYHEILLEDQAFLSQLWKEYSKGDSRYILSDGFIVCMESVTACLWGPLSLWVVIAFLRHQPFRFVLQLVVSVGQIYGDVLYFLTELRDGFQHGELGHPLYFWFYFVIMNAIWLVIPGILVFDAIKHLTNAQSMLDNKVMKIKSKHN

SEQ ID NO: 1789 - protein, 463 aa, Homo sapiens
METEQPEETFPNTETNGEFGKRPAEDMEEEQAFKRSRNTDEMVELRILLQSKNAGAVIGKGGKNIKALRTDYNASVSVPDSSGPERILSISADIETIGEILKKIIPTLEEGLQLPSPTATSQLPLESDAVECLNYQHYKGSDFDCELRLLIHQSLAGGIIGVKGAKIKELRENTQTTIKLFQECCPHSTDRVVLIGGKPDRVVECIKIILDLISESPIKGRAQPYDPNFYDETYDYGGFTMMFDDRRGRPVGFPMRGRGGFDRMPPGRGGRPMPPSRRDYDDMSPRRGPPPPPPGRGGRGGSRARNLPLPPPPPPRGGDLMAYDRRGRPGDRYDGMVGFSADETWDSAIDTWSPSEWQMAYEPQGGSGYDYSYAGGRGSYGDLGGPIITTQVTIPKDLAGSIIGKGGQRIKQIRHESGASIKIDEPLEGSEDRIITITGTQDQIQNAQYLLQNSVKQYSGKFF

SEQ ID NO: 1790 - protein, 335 aa, Homo sapiens
MALLARAFFAGVSRLPCDPGPQKFFSFGTKTLYQSIDAPQSKFFPPILKPMLPPNAFQGKVAFITGGGTGLGKAMTTFRSSLGAQCVIASRNIDVLKATAEEITSKTGNKVYAIRCDVRDPDMVHNTVLELIKVAGHPDVVINNAAGNFISPSERLSPNGWRTITDIVLNGTAYVTIEIGKQLIKAQKGVAFLAITTIYAESGSGFVMPSSSAKSGVEAMNKSLAAEWGRYGMRFNIIQPGPIKTKGAFSRLDPTGKFEKDMIERIPCGRLGTVEELANLATFLCSDYASWINGAVIRFDGGEEVFLSGEFNSLKKVTKEEWDVIEGLIRKTKGS

SEQ ID NO: 1791 - protein, 335 aa, Homo sapiens; identical to SEQ ID NO: 1790

SEQ ID NO: 1792 - protein, 143 aa, Homo sapiens [sequence omitted]

SEQ ID NO: 1793 - protein, 1523 aa, Homo sapiens
MDRLCGSGELGSKFWDSNLTVYTNTPDLTPCFQNSLLAWVPCIYLWAALPCYLFYLRHHRLGYIVLSCLSRLKTALGVLLWCISWVDLFYSFHGLVHGSSPAPVFFITPLLVGITMLLATLLIQYERLRGVRSSGVLIIFWLLCVICAIIPFRSKILLALAEGKILDPFRFTTFYIYFALVLCAFILSCFQEKPPLFSPENLDTNPCPEASAGFFSRLSFWWFTKLAILGYRRPLEDSDLWSLSEEDCSHKVVQRLLEAWQKQQTQASGPQTAALEPKIAGEDEVLLKARPKTKKPSFLRALVRTFTSSLLMGACFKLIQDLLSFINPQLLSILIRFISDPTAPTWWGFLLAGLMFVSSTMQTLILHQHYHCIFVMALRIRTAIIGVIYRKALTITNSVKREYTVGEMVNLMSVDAQRFMDVSPFINLLWSAPLQVILAIYFLWQILGPSALAGVAVIVLLIPLNGAVSMKMKTYQVQQMKFKDSRIKLMSEILNGIKVLKLYAWEPTFLEQVEGIRQGELQLLRKGAYLQAISTFIWVCTPFMVTLITLGVYVCVDKNNVLDAEKAFVSLSLFNILKIPLNLLPQLISGMTQTSVSLKRIQDFLNQDELDPQCVERKTISPGRAITIHNGTFSWSKDLPPTLHSLNIQIPKGALVAVVGPVGCGKSSLVSALLGEMEKLEGAVSVKGSVAYVPQQAWIQNCTLQENVLFGQPMNPKRYQQALETCALLADLDVLPGGDQTEIGEKGINLSGGQRQRVSLARAVYSDANIFLLDDPLSAVDSHVAKHIFDQVIGPEGVLAGKTRVLVTHGISFLPQTDFIIVLADGQITEMGHYSELLQHDGSFANFLRNYAPDENQEANEGVLQHANEEVLLLEDTLSTHTDLTDTEPAIYEVRKQFMREMSSLSSEGEGQNRPVLKRYTSSLEKEVPATQTKETGALIKEEIAETGNVKLSVYWDYAKSVGLCTTLFICLLYAGQNAVAIGANVWLSAWTNDVEEHGQQNNTSVRLGVYATLGILQGLLVMLSAFTMVVGAIQAARLLHTALLHNQIRAPQSFFDTTPSGRILNRFSKDIYVIDEVLAPTILMLFNSFYTSISTIVVIVASTPLFCVVVLPLAVFYGFVQRFYVATSRQLKRLESVSRSPIFSHFSETVTGTSVIRAYGRVQDFKVLSDAKVDSNQKTTYPYIASNRWLGVHVEFVGNCVVLFSALFAVIGRNSLNPGLVGLSVSYALQVTLSLNWMIRTLSDLESNIIAVERVKEYSKTETEAPWVLESNRAPEGWPRSGVVEFRNYSVRYRPGLELVLKNLTLHVQGGEKVGIVGRTGAGKSSMTLCLFRILEAAEGEIFIDGLNVAHIGLHDLRSQLTIIPQDPILFSGTLRMNLDPFGRYSDEDIWRTLELSHLSAFVSSQPTGLDFQCSEGGDNLSVGQRQLVCLARALLRKSRVLVLDEATAAIDLETDDLIQGTIRTQFEDCTVLTIAHRLNTIMDYNRVLVLDKGVVAEFDSPVNLIAAGGIFYGMAKDAGLA

SEQ ID NO: 1794 - protein, 208 aa, Homo sapiens
MAHGTTTLAFKFQHGVIVAVDSRASAGSYIATIRVNKVIEINPYLLGTMSGCAADCQYWERLLAKECRLYYLRNGERISVSAASKLLSNMMLQYRGMGLSMGSMICGWDKKGPGLYYVDDNGTRLSGQMFSTGSGNTYAYGVMDSGYRQDLSPEEAYDLARRAIVYATHRDSYSGGVVNMYHMKKDGWVKVESTDVSDLLHKYREATL

SEQ ID NO: 1795 - protein, 293 aa, Homo sapiens
MAMNKSVGLFSSASLAVDYVDSLLPENPLQEPFKNAWVYMLDNYTKFQIATWGSLIVHETIYFLFSLPGFLFQFIPFMRKYKIQKDKPETFEGQWKCLKGILFNHFFIQLPLICGTYYFTEFFNIPYDWERMPRWYFTLARCLGCAVIEDTWHYFLHRLLHHKRIYKYIHKVHHEFQAPFGIEAEYAHPLETLILGTGFFIGIVLLCDHVILLWAWVTMRLLETIDVHSGYDIPLNPLNYIPFYTGARHHDFHHMNFIGNYASTFTWWDRIFGTDVQYHAYTEKMKKLGKKSE

SEQ ID NO: 1796 - protein, 293 aa, Homo sapiens; identical to SEQ ID NO: 1795

SEQ ID NO: 1797 - protein, 218 aa, Homo sapiens
MSHLVEPPPPLHNNNNNCEEGEQSLPPPAGLNSSWVELPMNSSNGNGNGNGKNGGLEHVPSSSSIHNGDMEKILLDAQHESGQSSSRGSSHCDSPSPQEDGQIMFDVEMHTSRDHSSQSEEEVVDGEKEVEALKKSADWVSDWSSRPENIPPKEFHFRHPKRAASLSMRKSGAMKKGGIFSAEFLKVFIPSLFLSHVLALGLGIYIGKRLSTPSASTY

SEQ ID NO: 1798 - protein, 461 aa, Homo sapiens
MSRQVVRSSKFRHVFGQPAKADQCYEDVRVSQTTWDSGFCAVNPKFMALICEASGGGAFLVLPLGKTGRVDKNVPLVCGHTAPVLDIAWCPHNDNVIASGSEDCTVMVWEIPDGGLVLPLREPVVTLEGHTKRVGIVAWHPTAQNVLLSAGCDNVILVWDVGTGAAVLTLGPDVHPDTIYSVDWSRDGALICTSCRDKRVRVIEPRKGTVVAEKERPHEGTRPVHAVFVSEGKILTTGFSRMSERQVALWDTKHLEEPLSLQELDTSSGVLLPFFDPDTNIVYLCGKGDSSIRYFEITSEAPFLHYLSMFSSKESQRGMGYMPKRGLEVNKCEIARFYKLHERKCEPIAMTVPRKSDLFQEDLYPPTAGPDPALTAEEWLSGRDAGPLLISLKDGYVPPKSRELRVNRGLDSARRRATPEPSSTLSSDTVSRLEEDVRNLNAIVQKLQERLDRLEETVQAK

SEQ ID NO: 1799 - protein, 317 aa, Homo sapiens
MTEQMTLRGTLKGHNGWVTQIATTPQFPDMILSASRDKTIIMWKLTRDETNYGIPQRALRGHSHFVSDVVISSDGQFALSGSWDGTLRLWDLTTGTTTRRFVGHTKDVLSVAFSSDNRQIVSGSRDKTIKLWNTLGVCKYTVQDESHSEWVSCVRFSPNSSNPIIVSCGWDKLVKVWNLANCKLKTNHIGHTGYLNTVTVSPDGSLCASGGKDGQAMLWDLNEGKHLYTLDGGDIINALCFSPNRYWLCAATGPSIKIWDLEGKIMVDELKQEVISTSSKAEPPQCTSLAWSADGQTLFAGYTDNLVRVWQVTIGTR

SEQ ID NO: 1800 - protein, 198 aa, Homo sapiens
MGLGVLCLALVLLGVLQRQAQDSTQNLIPAPPLISVPLQPGFWTERFQGRWFVVGLAANAVQKERQSRFTMYSTIYELQEDNSYNVTSILVRGQGCRYWIRTFVPSSRPGQFTLGNIHSYPQIQSYDVQVADTDYDQFAMVFFQKTSENKQYFKVTLYGRTKGLSDELKERFVSFAKSLGLKDNNIVFSVPTDQCIDN

SEQ ID NO: 1801 - protein, 634 aa, Homo sapiens
MTVASTAAPSYTTSDTNRVISTFSVVDYVVFGLLLVLSLVIGLYHACRGWGRHTVGELLMADRKMGCLPVALSLLATFQSAVAILGGPAEIYRFGTQYWFLGCSYFLGLLIPAHIFIPVFYRLHLTSAYEYLELRFNKAVRICGTVTFIFQMVVYMGVALYAPSLALNAVTGFDLWLSVLALGIVCNIYTALGGLKAVIWTDVFQTLIMFLGQLVVIIVGAAKVGGLGHVWAVASQHGLISGIELDPDPFVRHTFWTLAFGGVFMMLSLYGVNQAQVQRYLSSHSEKAAVLSCYAVFPCQQVALCMSCLIGLVMFAYYKKYSMSPQQEQAAPDQLVLYFVMDLLKDMPGLPGLFVACLFSGSLSTISSAFNSLATVTMEDLIQPWFPQLTETRAIMLSRSLAFAYGLVCLGMAYVSSHLGSVLQAALSIFGMVGGPLLGLFCLGMFFPCANPLGAIVGLLTGLTMAFWIGIGSIVSRMSSAAASPPLNGSSSFLPSNLTVATVTTLMPSTLSKPTGLQQFYSLSYLWYSAHNSTTVIAVGLIVSLLTGGMRGRSLNPGTIYPVLPKLLALLPLSCQKRLCWRSHNQDIPVVTNLFPEKMGNGALQDSRDKERMAEDGLVHQPCSPTYIVQETSL

SEQ ID NO: 1802 - protein, 155 aa, Homo sapiens
MADIKNNPEYSSFFGVMGASSAMVFSAMGAAYGTAKSGTGIAAMSVMRPELIMKSIIPVVMAGIIAIYGLVVAVLIANSLTDGITLYRSFLQLGAGLSVGLSGLAAGFAIGIVGDAGVRGTAQQPRLFVGMILILIFAEVLGLYGLIVALILSTK

SEQ ID NO: 1803 - protein, 757 aa, Homo sapiens
MSLLFSRCNSIVTVKKDKRHMAEVNASPLKHFVTAKKKINGIFEQLGAYIQESAGFLEDTHRNTELDPVTTEEQVLDVKGYLSKVRGISEVLARRHMKVAFFGRTSNGKSTVINAMLWDKVLPSGIGHTTNCFLRVGGTDGHEAFLLTEGSEEKKSVKTVNQLAHALHQDEQLHAGSLVSVMLPNSKCPLLKDDLVLMDSPGIDVTTELDSWIDKFCLDADVFVLVANSESTLMQTEKQFFHKVSERLSRPNIFILNNRWDASAPEPEYMEEVRRQHMERCTSFLVDELGVVDRAQAGDRIFFVSAKEVLSARVQKAQGMPEGGGALAEGFQVRMFEFQNFERRFEECISQSAVKTKFEQHTVRAKQIAEAVRLIMDSLHIAAQEQRVYCLEMREERQDRLRFMDKQLELLAQDYKLRIKQMTEEVERQVTTAMAEEIRRLSVLVDEYQMDFHPSPVVLKVYKNELHRHIEEGLGRNMSDRCSTAIASSLQTMQQDMIDGLKPLLPVSVRNQIDMLVPRQCFSLSYDLNCDKLCADFQEDIEFHFSLGWTMLVNRFLGPKNSRRALLGYNDQVQRPLPLTPANPSMPPLPQGSLTQEELMVSMVTGLASLTSRTSMGILVVGGVVWKAVGWRLIALSFGLYGLLYVYERLTWTTRAKERAFKRQFVEYASEKLQLIISYTGSNCSHQVQQELSGTFAHLCQQVDITRDNLEQEIAAMNKKVEALDSLQSKAKLLRNKAGWLDSELNMFIHQYLQPGR

SEQ ID NO: 1804 - protein, 296 aa, Homo sapiens
MALAPELSRQTKLKEVAGIPLRDSTVDNWSQIQTFKAKPDDLLICTYPKSGTTWIQEIVNMIEQNGDVEKCQRTIIQHRHPFIEWARPPQPSGVDKANAMPAPRILRTHLPIQLLPPSFWTNNCKYLYVARNAKDCMVSFYHFYRMCQVLPNPGTWNEYFETFINGKVSCGSWFDHVKGWWEIRDRYQILFLFYEDMKRDPKREIQKVMQFMGKNLDEEVVDKIVLETSFEKMKDNPLTNFSTIPKTIMDQSISPFMRKGIVGDWKNHFTVAQNERFDEIYEQKMDGTSLNFCMEL

SEQ ID NO: 1805 - protein, 296 aa, Homo sapiens; identical to SEQ ID NO: 1804

SEQ ID NO: 1806 - protein, 109 aa, Homo sapiens
MAGALVRKAADYVRSKDFRDYLMSTHFWGPVANWGLPIAAINDMKKSPEIISGRMTFALCCYSLTFMRFAYKVQPRNWLLFACHVTNEVAQLIQGGRLINYEMSKRPSA

SEQ ID NO: 1807 - protein, 357 aa, Homo sapiens
MAELQEVQITEEKPLLPGQTPEAAKTHSVETPYGSVTFTVYGTPKPKRPAIFTYHDVGLNYKSCFQPLFQFGDMQEIIQNFVRVHVDAPGMEEGAPVFPLGYQYPSQDQLADMIPCILQYLNFSTIIGVGVGAGAYILSRYALNHPDTVEGLVLINIDPNAKGWMDWAAHKLTGLTSSIPEMILGHLFSQEELSGNSELIQKYRSLITHAPNLENIELYWNSYNNRRDLNFERGGEMTLKCPVMLVVGDQAPHEDAVVECNSKLDPTQTSFLKMADSGGQPQLTQPGKLTEAFKYFVQGMGYMASSCMTRLSRSRTASLTSAASIDGSRSRSRTLSQSSESGTLPSGPPGHTMEVSC

SEQ ID NO: 1808 - protein, 561 aa, Homo sapiens
MARKQPHSWLNAVLFGLLLILIHVWGQDSPESSSIRTTHTGQVRGKLDHVRDTKAGVHTFLGIPFAKAPVGPLRFAPPEDPEPWSGVRDGTSHPAMCLQNIDMLDEVGLTDMKMILSSIPMSEDCLYLNIYTPAHAHEGSNLPVMVCIHGGALVIGMASMCDGSLLAVNEDLVVVAIQYRLGVLGFFSTGDEHARGNWGYLDQVAALRWVQQNIAHFGGNPNRVTIFGVSAGGTSVSSHVISPMSQGLFHGAIMESGVALLPDLISETSETVSTTVAKLSGCEATDSETLVRCLRAKSGAEILVINKVFKMIPAVVDGEFLPRHPKELLASEDFRPVPSIIGVNTDEYCCTIPMVMGTAQIIKELSRENLQAVLKDTAAQMMLPPECGDLLMEEYMGNTDDPQTLQIQYAEMMGDFLFVIPALQVAHFQRSHAPVYFYEFQHAPSYFKNVRPPHVKADHADEVPFVFGSFFWGIKVDFTEEEKLLSRRMMKYWANFARHGNPNSEGLPYWPVLDHDEQYLQLDTQPAVDRALKARRLQFWTKTLPQKIQELNGAQKNHAEL

SEQ ID NO: 1809 - protein, 722 aa, Homo sapiens
MAEYLRLPHSLAMIRLCNPPVNAVSPTVIREVRNGLQKAGSDHTVKAIVICGANGNFCAGADIHGFSAFTPGLALGSLVDEIQRYQKPVLAAIQGVALGGGLELALGCHYRIANAKARVGLPEVTLGILPGARGTQLLPRVVGVPVALDLITSGKYLSADEALRLGILDAVVKSDPVEEAIKFAQKIIDKPIEPRRIFNKPVPSLPNMDSVFAEAIAKVRKQYPGVLAPETCVRSIQASVKHPYEVGIKEEEKLFMYLRASGQAKALQYAFFAEKSANKWSTPSGASWKTASAQPVSSVGVLGLGTMGRGIAISFARVGISVVAVESDPKQLDAAKKIITFTLEKEASRAHQNGQASAKPKLRFSSSTKELSTVDLVVEAVFEDMNLKKKVFAELSALCKPGAFLCTNTSALNVDDIASSTDRPQLVIGTHFFSPAHVMRLLEVIPSRYSSPTTIATVMSLSKKIGKIGVVVGNCYGFVGNRMLAPYYNQGFFLLEEGSKPEDVDGVLEEFGFKMGPFRVSDLAGLDVGWKIRKGQGLTGPSLPPGTPVRKRGNSRYSPLGDMLCEAGRFGQKTGKGWYQYDKPLGRIHKPDPWLSTFLSQYREVHHIEQRTISKEEILERCLYSLINEAFRILEEGMAARPEHIDVIYLHGYGWPRHKGGPMFYAASVGLPTVLEKLQKYYRQNPDIPQLEPSDYLRRLVAQGSPPLKEWQSLAGPHGSKL

SEQ ID NO: 1810 - protein, 452 aa, Homo sapiens
MEFQAVVMAVGGGSRMTDLTSSIPKPLLPVGNKPLIWYPLNLLERVGFEEVIVVTTKDVQKALCAEFKMKLKPDIVCIPDEADMGTADSLRHIYPKLKTDVLVLGCDLITDVALHEVVDLFRAYDASLAMLMRKGQESTEPVPGQKGKKKTVEQRDFIGVDSTGKRLLFMANEADLDEELVIKGSILQKHPRIHFQTGLVDAHLYCLKKYVVDFLMENKSITSIRSELIPYLVRKQFSSASSQQRQEDKEEDLKKKEPKSLDIYSFIKKDNTLTLAPYDACWNAFRRDKWEDLSRSQVRCYVHIMKEGLCSRVSTLGLYMEANRQVPKLLSVLCPEESMIHPSAQIANKHLIGADSLIGSDTQVGEKSSIKRSVIGSSCVIRDRVTVTNCLLMNSVTVEEGSSIHGSVICNNAVVEAGAEIRDCLIGSGQRIEAKAKRMNEVIVGNDQLMEI

SEQ ID NO: 1811 - protein, 452 aa, Homo sapiens; identical to SEQ ID NO: 1810

SEQ ID NO: 1812 - protein, 452 aa, Homo sapiens; identical to SEQ ID NO: 1810

SEQ ID NO: 1813 - protein, 436 aa, Homo sapiens
MRVVSSLFLPVLLAEVWLVSSFNLSSHTPEAPIRLVSQDYENQTWEEYEWADPRDDNEYWLRASQQLSNETSSFGFSLLRKISMRHDGNVIFSPFGLSVAMVNLMLGAKGETKVQVENGLNLQALSQAGPLILPALFKRVKETFSSNKKLGLTQGSFAFIHKDFEIKKTYFNLSTMYFDTEYVPTNFRNSSQARGLMNHYINKETEGKIPKLFDEINPETKLILVDYILFKGKWLTPFDPIFTEADTFHLDKYKAVKVPMMYREGNFASTFDKKFRCHILKLPYQGNATMLVVLMEKSGDHLALEDYLTTDLVEMWLQDMKTRKMEVFFPKFKLNQRYEMHELLKQVGIRRIFSTSADLSELSAVARNLQVSKVVQQSVLEVDERGTEVVSGTVSEITAYCMPPVIKVDRPFHFIIYEEMSRMLLFLGRVVNPTVL

SEQ ID NO: 1814 - protein, 602 aa, Homo sapiens
MDNRVSGTTSNGETKPVCPVMEKVEEDGTLEREQWTNKMEFVLSVAGEIIGLGNVWRFPYLCYKNGGGAFFIPYLIFLFTCGIPVFFLETALGQYTNQGGITAWRKICPIFEGIGYASQMIVSLLNVYYIVVLAWALFYLFSSFTTDLPWGSCSHEWNTENCVEFQKTNNSLNVTSENATSPVIEFWERRVLKISDGIQHLGSLRWELVLCLLLAWIICYFCIWKGVKSTGKVVYFTATFPYLMLVVLLIRGVTLPGAAQGIQFYLYPNITRLWDPQVWMDAGTQIFFSFAICLGCLTALGSYNKYHNNCYRDCVALCILNSSTSFVAGFAIFSILGFMSQEQGVPISEVAESGPGLAFIAYPRAVVMLPFSPLWACCFFFMVVLLGLDSQFVCVESLVTALVDMYPRVFRKKNRREILILIVSVVSFFIGLIMLTEGGMYVFQLFDYYAASGMCLLFVAIFESLCVAWVYGASRFYDNIEDMIGYKPWPLIKYCWLFFTPAVCLATFLFSLIKYTPLTYNKKYTYPWWGDALGWLLALSSMVCIPAWSIYKLRTLKGPLRERLRQLVCPAEDLPQKSQPELTSPATPMTSLLRLTELESNC

SEQ ID NO: 1815 - protein, 295 aa, Homo sapiens
MFYIQSSEALQILKNSLRKHLPESLKVYGTVFHMNQGNPFKLKAVVDKWPDFNTVVIRPQEQDMTDDLDHYNNTYLIYSKDPKHCQEFLGSSDVINWKQHLQIQSSQSDLGKVIENLGATNLGKVKHKQCFLYMVSHTAKKLTPSLVDAKHLVVSSEKPTPFDHQLFKFARLDVKHAALVNSIWYFGGNEKSQKFIERCIFTFPSVCIMGPEGTPVSWALMDHTGELRMAGTLPKYRHQNLIYHVAFHQVHTLEKLGFPMYLHVDKVNLTIQRMSAVLGHVPMPCTWNQWNWVPL

SEQ ID NO: 1816 - protein, 184 aa, Homo sapiens
MREYKLVVLGSGGVGKSALTVQFVQGIFVEKYDPTIEDSYRKQVEVDAQQCMLEILDTAGTEQFTAMRDLYMKNGQGFALVYSITAQSTFNDLQDLREQILRVKDTDDVPMILVGNKCDLEDERVVGKEQGQNLARQWSNCAFLESSAKSKINVNEIFYDLVRQINRKTPVPGKARKKSSCQLL

SEQ ID NO: 1817 - protein, 299 aa, Homo sapiens
MEHFDASLSTYFRALLGPRDTRVKGWFLLDNYIPTFVCSAIYLLIVWLGPKYMKNRQPFSCRGILVVYNLGLTLLSLYMFYELVTGVWEGKYNFFCQGTRSAGESDMKVIRVLWWYYFSKLIEFMDTFFFILRKNNHQITVLHVYHHATMLNIWWFVMNWVPCGHSYFGATLNSFIHVLMYSYYGLSSVPSMRPYLWWKKYITQGQLVQFVLTIIQTSCGVIWPCSFPLGWLYFQIGYMISLIALFTNFYIQTYNKKGASRRKEHLKGHQNGSMTAVNGHTNNFASLENSVTSRKQRKD

SEQ ID NO: 1818 - protein, 338 aa, Homo sapiens
MSRSPAPRAVSGAPLRPGTVLGTMEMGRRMDASASAATVRAFLERGLNELDTAFMYCDGQSESILGSLGLGLGSGDCTVKIATKANPWDGKSLKPDSVRSQLETSLKRLQCPRVDLFYLHAPDHGTPIVETLQACQQLHQEGKFVELGLSNYASWEVAEIYTLCKSNGWILPTVYQGMYNATTRQVETELLPCLRYFGLRFYAYNPLAGGLLTGKYRYEDKDGKQPEGRFFGNSWSETYRNRFWKEHHFEAIALVEKALKTTYGTSAPSMTSAALRWMYHHSQLQGTRGDAVILGMSSLEQLEQNLAATEEGPLEPAVVEAFNQAWNVVAHECPNYFR

SEQ ID NO: 1819 - protein, 338 aa, Homo sapiens; identical to SEQ ID NO: 1818

SEQ ID NO: 1820 - protein, 338 aa, Homo sapiens
MGSSSSTALARLGLPGQPRSTWLGVAALGLAAVALGTVAWRRARPRRRRQLQQVGTVSKVWIYPIKSCKGVSVCETECTDMGLRCGKVRDRFWMVVKEDGHMITARQEPRLVLVTITLENNYLMLEAPGMEPIVLPIKLPSSNKIHDCRLFGLDIKGRDCGDEVARWFTSYLKTQAYRLVQFDTKMKGRTTKKLYPSESYLQNYEVAYPDCSPIHLISEASLVDLNTRLQKKVKMEYFRPNIVVSGCEAFEEDTWDELLIGDVEMKRVLSCPRCVLTTVDPDTGIIDRKEPLETLKSYRLCDPSVKSLYQSSPLFGMYFSVEKIGSLRVGDPVYRMVD

SEQ ID NO: 1821 - protein, 477 aa, Homo sapiens; identical to SEQ ID NO: 1331

SEQ ID NO: 1822 - protein, 263 aa, Homo sapiens
MGESALEPGPVPGAPAGGPVHAVTVVTLLEKLATMLEALRERQGGLAERQGGLAGSVRRIQSGLGALSRSHDTTSNTLAQLLAKAERVGSHADAAQERAVHRAAQVQRLEANHGLLVARGKLHVLLFKEETEIPARAFQKAPELLGPEDQLVLGPEQPEDEVGESSDEEPVESRAQRLRRTGLQKVQSLKRAFSSRKGSEAAQPTPVKPPRLGPVRNSEGPAEGQPAAQPAMEPVLPSALEPEPPQPTKEDPERPVLQIESAA

SEQ ID NO: 1823 - protein, 263 aa, Homo sapiens; identical to SEQ ID NO: 1822

SEQ ID NO: 1824 - protein, 323 aa, Homo sapiens
MNSKIQKMELNDGHSIPVLGFGTYATEENLRKKSMESTKIAIDVGFRHIDCSHLYQNEEEIGQAIVSKIEDGTVKREDIFYTSKLWSTSHRPELVRPSLENSLRKLNLDYVDLYLIHFPVSLKPGDELLPQDEHGNLILDTVDLCDTWEAMEKCKDAGLAKSIGVSNFNRRQLEKILNKPGLKHRPVCNQVECHLYLNQSKLLAYCKMNDIVLVAYGALGTQRYKYCINEDTPVLLDDPILCTMAKKYKRTPALIALRYQLERGIVTLVKSFNEERIRENLQVFDFQLASDDMEILDNLDRNLRYFPANMFKAHPNFPFSDEY

SEQ ID NO: 1825 - protein, 323 aa, Homo sapiens; identical to SEQ ID NO: 1824

SEQ ID NO: 1826 - protein, 490 aa, Homo sapiens
MDPVVVLLLSLFFLLFLSLWRLSSGRGKLPPGPTPLPIIGNFFQVDMKDIRQSLTNFSKTYGPVYTLYVGSQPTVVLHGYEALKEALVDHGEEFSGRGRLPICEKVAKGQGIAFSHGNVWKATRHFTVKTLRNLGMGKGTIEDKVQEEAKWLVKELKKTNGSPCDPQFIMGCAPGNVICCIILQNRFDYEDKDFLNLIEKVNEAVKIISSPGIQVFNIFPILLDYCPGNHNIYLKNYTWVKSYLLEKIKEHEESLDVSNPRDFIDYFLIERNQENANQWMNYTLEHLAIMVTDLFFAGIETVSSTMRFALLLLMKYPHVTAKVQEEIDHVIGRHRSPSMQDRSHMPYTNAMVHEVQRYIDIGPNGLLHDVTCDTKFRNYFIPKGTAVLTSLTSVLHDSKEFPNPEMFDPGHFLDENGNFKKSDYFIPFSAGKRMCLGESLARMELFLFLTTILQNFKLKSLVDPKDINTTPICSSLSSVPPTFQMRFIPL

SEQ ID NO: 1827 - protein, 152 aa, Homo sapiens
MANSERTFIAIKPDGVQRGLVGEIIKRFEQKGFRLVGLKFIQASEDLLKEHYIDLKDRPFFSGLVKYMHSGPVVAMVWEGLNVVKTGRVMLGETNPADSKPGTIRGDFCIQVGRNIIHGSDSVESAEKEISLWFQPEELVDYKSCAQNWIYE

SEQ ID NO: 1828 - protein, 308 aa, Homo sapiens
MKHYEVEIRDAKTREKLCFLDKVEPQATISEIKTLFTKTHPQWYPARQSLRLDPKGKSLKDEDVLQKLPVGTTATLYFRDLGAQISWVTVFLTEYAGPLFIYLLFYFRVPFIYGRKYDFTSSRHTVVHLACMCHSFHYIKRLLETLFVHRFSHGTMPLRNIFKNCTYYWGFAAWMAYYINHPLYTPPTYGVQQVKLALAIFVICQLGNFSIHMALRDLRPAGSKTRKIPYPTKNPFTWLFLLVSCPNYTYEVGSWIGFAIMTQCVPVALFSLVGFTQMTIWAKGKHRSYLKEFRDYPPLRMPIIPFLL

SEQ ID NO: 1829 - protein, 308 aa, Homo sapiens; identical to SEQ ID NO: 1828

SEQ ID NO: 1830 - protein, 61 aa, Homo sapiens
MDPNCSCSTGGSCTCSSSCGCKNCKCTSCKKSCCSCCPVGCSKCAQGCVCKGASDKCTCCA

SEQ ID NO: 1831 - protein, 61 aa, Homo sapiens; identical to SEQ ID NO: 1830

SEQ ID NO: 1832 - protein, 357 aa, Homo sapiens
MQFLVALLLLSVAVARALPSASKPNNTSSENNPPIQPSTPLPPGVDISQQVKTNRPTDQRLESDKEGQDKTVARTSASVSSGVESATNLNLDDSKKHPETADAKLKETLQQLLPVDPKQEKSGQKFTKDSGSPTGGDSDNTTGGDSNKTTGVDSDKTSGGDSNKPTGSDNDKPTGGDSNKPTSKVPSNTETPKIDKVQLTEKGQKPTLISKTESGEKLAGDSDFSLKPEKGDKSSEPTEDVETKEIEEGDTEPEEGSPLEEENEKVLGPSSSENQEGTLTDSMKDEKDDHYKDNSGNTSAESSHFFAYLVTAAVLVAVLYIAYHNKRKIIAFALEGKRSKVTRRPKASDYQRLNLKL

SEQ ID NO: 1833 - protein, 329 aa, Homo sapiens
MVQAKTWTLKKHFEGFPTDSNFELRTTELPPLNNGEVLLEALFLSVDPYMRVAAKKLKEGDSMMGEQVARVVESKNSAFPTGTIVVALLGWTSHSISDGNGLRKLPAEWPDKLPLSLALGTVGMPGLTAYFGLLDICGLKGGETVLVNAAAGAVGSVVGQIAKLKGCKVVGTAGSDEKVAYLKKLGFDVAFNYKTVKSLEEALRTASPDGYDCYFDNVGGEFSNTVILQMKTFGRIAICGAISQYNRTGPCPPGPSPEVIIYQQLRMEGFIVTRWQGEVRQKALTDLMNWVSEGKIRYHEYITEGFEKMPAAFMGMLKGDNLGKTIVKA

SEQ ID NO: 1834 - protein, 301 aa, Homo sapiens
MGAQLSTLSRVVLSPVWFVYSLFMKLFQRSSPAITLENPDIKYPLRLIDKEIISHDTRRFRFALPSPQHILGLPIGQHIYLSTRIDGNLVIRPYTPVSSDDDKGFVDLVVKVYFKDTHPKFPAGGKMSQYLENMNIGDTIEFRGPNGLLVYQGKGKFAIRADKKSNPVVRTVKSVGMIAGGTGITPMLQVIRAVLKDPNDHTVCYLLFANQSEKDILLRPELEELRNEHSSRFKLWYTVDKAPDAWDYSQGFVNEEMIRDHLPPPGEETLILMCGPPPMIQFACLPNLERVGHPKERCFTF

SEQ ID NO: 1835 - protein, 301 aa, Homo sapiens; identical to SEQ ID NO: 1834

SEQ ID NO: 1836 - protein, 301 aa, Homo sapiens; identical to SEQ ID NO: 1834

SEQ ID NO: 1837 - protein, 694 aa, Homo sapiens
MGKSPEMWCFVFFSLLASFSAEPTMYGEILSPNYPQAYPNEVVKTWDIEVPEGFGIHLYFTHLDMELSENCAYDSVQIISGGIEEERLCGQRSSKSPNSPTVEEFQFPYNRLQVVFTSDFSNEERFTGFAAYYSAVDVNECTDFTDVPCSHFCNNFIGGYFCSCPPEYFLHDDMRTCGVNCSGDVFTALIGEIASPNYPNPYPENSRCEYQIRLQEGFRLVLTIRREDFDVEPADSEGNCHDSLTFAAKNQQFGPYCGNGFPGPLTIKTQSNTLDIVFQTDLTGQNKGWKLRYHGDPIPCPKEISANSIWEPEKAKYVFKDVVKITCVDGFEVVEGNVGSTSFYSTCQSNGQWSNSRLECQPVDCGVPEPIENGKVEDPEDTVFGSVIHYTCEEPYYYMEQEEGGEYHCAANGSWVNDQLGVELPKCIPVCGVPTEPFKVQQRIFGGYSTKIQSFPWQVYFESPRGGGALIDEYWVLTAAHVVEGNSDPVMYVGSTLLKIERLRNAQRLITERVIIHPSWKQEDDLNTRTNFDNDIALVQLKDPVKMGPTVAPICLPETFSDYNPSEVDLGLISGWGRTEIRTNVIQLRGAKLPITSLEKCQQVKVENPKARSNDYVFTDNMICAGEKGVDSCEGDSGGAFALPVPNVKDPKFYVAGLVSWGKKCGTYGIYTKVKNYVDWILKTMQENSGPKKD

SEQ ID NO: 1838 - protein, 535 aa, Homo sapiens
MLPRLGDLLFYTIAEGQERIPIHKFTTALKATGLQTSDPRLQDCMSKMQRMVQESSSGGLLDRELFQKCVSSNIVLLTQAFRKKFVIPDFEEFTGHVDRIFEDAKELTGGKVAAYIPHLAKSNPDLWGVSLCTVDGQRHSVGHTKIPFCLQSCVKPLTYAISVSTLGTDYVHKFVGKEPSGLRYNKLSLNEEGIPHNPMVNAGAIVVSSLIKMDCNKAEKFDFVLQYLNKMAGNEFMGFSNATFQSEKETGDRNYAIGYYLKEKKCFPNPVDMMAALDLYFQLCSVEVTCESGSVMAATLANGGICPITGESVLSAEAVRNTLSLMHSCGMYDFSGQFAFHVGLPAKSAVSGAILLVVPNVMGMMCLSPPLDKLGNSHRGISFCQKLVSLFNFHNYDNLRHCARKLDPRREGGEVRNKTVVNLLFAAYSGDVSALRRFALSAVDMEQKDYDSRTALHVAAAEGHIDVVKFLIEACKVNPFVKDRWGNIPLDDAVQFNHLEVVKLLQDYHDSYMLSETQAEVAAETLSKENLESMV

SEQ ID NO: 1839 - protein, 312 aa, Homo sapiens
MQSYKYDKAIVPESKNGGSPALNNNPRKGGSKRVLLICLDLFCLFMAALPFLIIETSTIKPYRRGFYCNDESIKYPLKVSETINDAVLCAVGIVIAILAIITGEFYRIYYLKEKSRSTIQNPYVAALYKQVGCFLFGCAISQSFTDIAKVSIGRLRPHFLSVCDPDFSQINCSEGYIQNYRCRGEDSKVQEARKSFFSGHASFSMFTMLYLVLYLQARFTWRGARLLRPLLQFTLLMMAFYTGLSRVSDYKHHPSDVLAGFAQGALVACCIVFFVSDLFKTKTTLSLPAPAIRREILSPVDIMDRSNHHNMV

SEQ ID NO: 1840 - protein, 1179 aa, Homo sapiens
MSKTLKKKKHWLSKVQECAVSWAGPPGDLGAEIRGGAERGEFPYLGRLRDEPGGGGGTCCVVSGKAPSPGDVLLEVNGTPVSGLTNRDTLAVIRHFREPIRLKTVKPGKVINKDLRHYLSLQFQKGSIDHKLQQVIRDNLYLITIPCTTRAPRDGEVPGVDYNFISVEQFKALEESGALLESGTYDGNFYGTPKPPAEPSPFQPDPVDQVLFDNEFDTESQRKRTTSVSKMERMDSSLPEEEEDEDKEAVNGSGSMETREMHSESSDCWMKTVPSYNQTNRSMDFRNYMMRDENLEPLPKNWEMAYTDTGTIYFIDHNTKTTTWLDPRLCKKAKAPEDCEDGELPYGWEKIEDPQYGTYYVDHLNQKTQFENPVEEAKRKKQIGQAETHSAKTDVERAHFTRDPSQLKGVLVRASLKKSTMGFGFTIIGGDRPDEFLQVKNVLKDGPAAQDGKMAPGDVIVDINGNCVLGHTHADVVQMFQLVPVNQYVNLTLCRGYALPDDSEDPVVDIVAATPVINGQSLAKGEACMSTQDFKLGAMVLDQNGKSGKLLSSDRLNGPSDSNEQRASLASSGSSQPELVTIPLVKGPKGFGFAIADSPTGQKVKMILDSQWCQGLQKGDIIKEIYHQNVQNLTHLQVVEVLKQFPVGADVPLLILRGGPCSPTKTAKMKTDTKETSGSLETINEPTPQPMPFPPSIIRSGSPKLDPSEVYLKSKTLYEDKPPNTKDLDVFLRKQESGFGFRVLGGDGPDQSIYIGAIIPLGAAEKDGRLRAADELMCIDGIPVKGKSHKQVLDLMTTAARNGHVLLTVRRKIFYGEKQPEDESPQAFSQSGSPRLNRTELPTRSAPQESYDVILQRKENEGFGFVILTSKSKPPPGVIPHKIGRVIDGSPADRCGRLKVGDHISAVNGQSIVDLSHDNIVQLIKDAGVTVTLTVVAEEEHHGPPSGTNSARQSPALQHRPMGQAQATHIPGDRTALEGEVGKDVCSSYRHSWSDHKHLAQPDTAVISVVGSRHSQSLGCYPVELERGPRGFGFSLRGGKEYNMGLFILRLAEDGPAIKDGRIHVGDQIVEINGEPTQGITHTRAIELIQAGGNKVLLLLRPGTGLIPDHGDWDIYSPSSSNVIYDEQPPPLPSSHSAATFEESHVPVTEDSLIRVQTCEKAEELKDTVQEKHFKWKPA

SEQ ID NO: 1841 - protein, 98 aa, Homo sapiens
MNPSAAVVLCLVLLSLSGTQGIPLARTVRCTCIDFHEQTLRPRAIGKLEIIPASLSCPHVEIIATMKKNNEKRCLNPESEAIKSLLKAVSQRRSKRAP

SEQ ID NO: 1842 - protein, 240 aa, Homo sapiens
MYFKKRRWFLILESLLLSLVTGFQDQSVPNVNAITGSNVTLTILKHPLASYQRLTWLHTTNQKILEYFPNGKKTVFESVFKDRVDLDKTNGALRIYNVSKEDRGDYYMRMLHETEDQWKITMEVYDLVSKPAIKIEKTKNLTDSCHLRLSCKVEDQGVDYTWYEDSGPFPQRNPGYVLEITITPHNKSTFYTCQVSNPVSSENDTLYFIPPCTLARSSGVHWIAAWLVVTLSIIPSILLA

SEQ ID NO: 1843 - protein, 204 aa, Homo sapiens [sequence omitted]

SEQ ID NO: 1844 - protein, 358 aa, Homo sapiens
MPAHMLQEISSSYTTTTTITEPPSGNLQNGREKMKKVPLYLEEDIRPEMREDIHDPSYQDEEGPPPKLEYVWRNIILMALLHVGALYGITLIPSSKVYTLLWGIFYYLISALGITAGAHRLWSHRTYKARLPLRIFLIIANTMAFQNDVYEWARDHRAHHKFSETHADPHNSRRGFFFSHVGWLLVRKHPAVKEKGGKLDMSDLKAEKLVMFQRRYYKPGLLLMCFILPTLVPWYCWGETFLHSLFVSTFLRYTLVLNATWLVNSAAHLYGYRPYDKNIQSRENILVSLGSVGEGFHNYHHAFPYDYSASEYRWHINFTTFFIDCMAALGLAYDRKKVSKAAVLARIKRTGDGSHKSS

SEQ ID NO: 1845 - protein, 358 aa, Homo sapiens; identical to SEQ ID NO: 1844

SEQ ID NO: 1846 - protein, 349 aa, Homo sapiens
MRATSLAASADVPCRKKPLEFDDNIDVECPVLKRVRDEPEPGPTPSLPPASDLSPAVAPATRLGPYILLEREQGNCTYRALHCPTGTEYTCKVYPASEAQAVLAPYARLPTHQHVARPTEVLLGSQLLYTFFTKTHGDLHSLVRSRRGIPEPEAAALFRQMASAVAHCHKHGLILRDLKLRRFVFSNCERTKLVLENLEDACVMTGPDDSLWDKHACPAYVGPEILSSRPSYSGRAADVWSLGVALFTMLAGRYPFQDSEPALLFGKIRRGTFALPEGLSASARCLIRCLLRREPSERLVALGILLHPWLREDCSQVSPPRSDRREMDQVVPDGPQLEEAEEGEVGLYG

SEQ ID NO: 1847 - protein, 423 aa, Homo sapiens
MHYTRCLLLLLAGLLELSHSQPDQEEPDNTTNQTYRQFSQQNISSYQIASGNANFAFRLYHLIASQNSEKNIFFSPLSISVSLAILSTGAGGDTQAQILEGLGFNLTKLSLPEIHEGFRSLQHTIARPFTEPQISVGSALILSQNLQILSEFVSAIETSYNSKVLHANFRDKEAAVQLINNYVKQNTQGKIKNLVSDLSPDVKMVLVNYIFFQGLWKKPFPSSRVSTSDFYVDENTVVKIPMMLQDKEDHWHLEDRRVPCTVLRMDYRGDAVAFFILPDQGKMNEVEQVLSPGMLLRWKRLLQNRFFYRKLILQLPKFSISNSYELDEILPDLGFQDLFTPNANFSNISKKEKLYLSKVFHKTVLDVNEVGTKAAAATGSFATFFSAQPKKRYLIFNRPFLVILYSTSSQDILFMGKVVNPTA

SEQ ID NO: 1848 - protein, 211 aa, Homo sapiens
MQTPHKEHLYKLLVIGDLGVGKTSIIKRYVHQNFSSHYRATIGVDFALKVLHWDPETVVRLQLWDIAGQERFGNMTRVYYREAMGAFIVFDVTRPATFEAVAKWKNDLDSKLTLPNGKPVSVVLLANKCDQGKDVLVNNGLKMDQFCKEHGFVGWFETSAKENINIDEASRCLVKHILANECDFIESIEPDIVKPHLTSPKVVSCSGCAKS

SEQ ID NO: 1849 - protein, 1500 aa, Homo sapiens
MRRNQLPIPVFLLLLLLLPRDATAATGKPRYVVLVPSELYAGVPEKVCVHLNHLNETVTLNVTLEYGVQYSNLLIDQAVDKDSSYCSSFTISRPLSPSALIAVEIKGPTHHFIKKKSMWITKAESPVFVQTDKPIYKPGQTVKFRVVSVDISFRPVNETFPVVYIENPKRNRIFQWQNVDLPGGLHQLSFPLSVEPALGIYKVVVQKDSGKKIEHSFEVKEYVLPKFEVQVKMPKTMAFLEEELVVTACGLYTYGKPVPGLVTMKVCRKYTQSYSNCHGQHSKSICEEFSKQADEKGCFRQVVKTKVFQPRQKGYDMKIEVEAKIKEDGTGIELTGTGSCEIANTLSKLKFTKANTFYRPGLPFFGQVLLVDEKGQPIPNKNLTVQVNSVRSQFTFTTDEHGLANILIDTTNFTFSFMGIRVIYKQNNICFDNWWVDEYHTQADHSAARIFSPSRSYIQLELVLGTLACGQTQEIRIHFLLNEDALKDAKDLTFYYLIKARGSIFNSGSHVFPLEQGKVKGVVSFPIRVEPGMAPVAKLIVYTILPNEELIADVQKFDIEKCFANTVNLSFPSAQSLPASDTHLTVKATPLSLCALTAVDQSVLLLKPEAKLSPQSIYNLLPQKAEQGAYLGPLPYKGGENCIKAEDITHNGIVYTPKQDLNDNDAYSVFQSIGLKIFTNTRVHKPRYCPMYQAYPPLPYVGEPQALAMSAIPGAGYRSSNIRTSSMMMMGASEVAQEVEVRETVRKYFPETWIWDMVPLDLSGDGELPVKVPDTITEWKASAFCLSGTTGLGLSSTISHKVFQPFFLELTLPYSVVRGEAFILKATVLNYMPHCIRIHVSLEMSPDFLAVPVGSHEDSHCICGNERKTVSWAVTPKSLGEVNFTATAEALQSPELCGNKVAEVPALVQKDTVVKPVIVEPEGIEKEQTYNTLLCPQDAELQENWTLDLPANVVEGSARATQSVLGDILGSAMQNLQNLLQMPYGCGEQNMVLFVPNIYVLEYLNETQQLTEAIKSKAISYLISGYQRQLNYQHSDGSYSTFGDRGMRHSQGNTWLTAFVLKAFAQAQSYIYIEKTHITNAFNWLSMKQRENGCFQQSGSLLNNAMKGGVDDEVTLSAYITIALLEMPLPVTHSVVRNALFCLETAWASISNSQESHVYTKALLAYAFALAGNRAKRSEVLESLNKDAVNEEESVHWQRPKNVEENVREMRSFSYKPRAPSAEVEMTAYVLLAYLTSASSRPTRDLSSSDLTTASKIVKWISKQQNSHGGFSSTQDTVVALQALSKYGAATFTKSNKEVSVTIESSGTVSGTLHVNNGNRLLLQEVRLADLPGNYITKVSGSGCVYLQTSLKYNILPEAEGEAPFTLKVNTLPLNFDKAEHHRKFQIHINVSYIGERPNSNMVIVDVKMVSGFIPVKPSVKKLQDQSNIQRTEVNTNHVLIYIEKLTNQTMGFSFAVEQDIPVKNLKPAPVKVYDYYETDEFAIEEYSAPFSSDSEQGNA

SEQ ID NO: 1850 - protein, 456 aa, Homo sapiens
MKIEEVKSTTKTQRIASHSHVKGLGLDESGLAKQAASGLVGQENAREACGVIVELIKSKKMAGRAVLLAGPPGTGKTALALAIAQELGSKVPFCPMVGSEVYSTEIKKTEVLMENFRRAIGLRIKETKEVYEGEVTELTPCETENPMGGYGKTISHVIIGLKTAKGTKQLKLDPSIFESLQKERVEAGDVIYIEANSGAVKRQGRCDTYATEFDLEAEEYVPLPKGDVHKKKEIIQDVTLHDLDVANARPQGGQDILSMMGQLMKPKKTEITDKLRGEINKVVNKYIDQGVAELVPGVLFVDEVHMLDIECFTYLHRALESSIAPIVIFASNRGNCVIRGTEDITSPHGIPLDLLDRVMIIRTMLYTPQEMKQIIKIRAQTEGINISEEALNHLGEIGTKTTLRYSVQLLTPANLLAKINGKDSIEKEHVEEISELFYDAKSSAKILADQQDKYMK

SEQ ID NO: 1851 - protein, 503 aa, Homo sapiens
MDLIPNFSMETWLLLVISLVLLYLYGTHSHGIFKKLGIPGPKPLPFLGTILAYRKGFWEFDKYCHKKYGKLWGLYDGRQPVLAITDPDIIKTVLVKECYSTFTNRRNFGPVGILKKAISISEDEEWKRIRALLSPTFTSGKLKEMFPIINQYTDMLVRNMRQGSEEGKPTSMKDIFGAYSMDVITATSFGVNVDSLNNPQDPFVEKVKKLLKFDIFDPLFLSVTLFPFLTPLFEALNVSMFPRDVIDFFKTSVERMKENRMKEKEKQRMDFLQLMINSQNSKVKDSHKALSDVEIVAQSVIFIFAGYETTSSALSFVLYLLAIHPDIQKKLQDEIDAALPNKAHATYDTLLQMEYLDMVVNETLRLYPIAGRLERVCKTDVEINGVFIPKGTVVMIPTFALHKDPHYWPEPEEFRPERFSKKNQDNINPYMYLPFGNGPRNCIGMRFALMNMKVALVRVLQNFSFQPCKETQIPLKLSKQGLLQPEKPLLLKVVSRDETVNGA

SEQ ID NO: 1852 - protein, 504 aa, Homo sapiens
MDLLSALTLETWVLLAVILVLLYRLGTHRHGIFKKQGIPGPKPLPFLGTVLNYYKGLGRFDMECYKKYGKIWGLFDGQTPVFAIMDTEMIKNVLVKECFSVFTNRRDFGPVGIMGKAVSVAKDEEWKRYRALLSPTFTSGRLKEMFPIIEQYGDILVKYLKQEAETGKPVTMKKVFGAYSMDVITSTSFGVNVDSLNNPKDPFVEKTKKLLRFDFFDPLFLSVVLFPFLTPIYEMLNICMFPKDSIAFFQKFVHRIKETRLDSKHKHRVDFLQLMLNAHNNSKDEVSHKALSDVEIIAQSVIFIFAGYETTSSTLSFVLYFLATHPDIQKKLQEEIDGALPSKAPPTYDIVMEMEYLDMVLNETLRLYPIGNRLERVCKKDIELDGLFIPKGSVVTIPTYALHHDPQHWPKPEEFHPERFSKENKGSIHPYVYLPFGNGPRNCIDMRFALMNMKLALTKVLQNFSFQPCKETQIPLKLSRQAILEPEKPIVLKVLPRDAVINGA

SEQ ID NO: 1853 - protein, 504 aa, Homo sapiens; identical to SEQ ID NO: 1317

SEQ ID NO: 1854 - protein, 530 aa, Homo sapiens
MPGKWISALLLLQISCCFQSGNCGKVLVWPMEFSHWMNIKTILDELVQRGHEVTVLKPSAYYVLDPKKSPDLKFETFPTSVSKDELENYFIKLVDVWTYELQRDTCLSYSPLLQNMIDGFSDYYLSLCKDTVSNKQLMAKLQESKFDVLLSDPVAACGELIAEVLHIPFLYSLRFSPGYKIEKSSGRFILPPSYVPVILSGMGGPMTFIDRVKNMICTLYFDFWFHMFNAKKWDPFYSEILGRPTTLAETMGKAEMWLIRSYWDLEFPHPTLPNVDYIGGLQCRPPKPLPKDMEDFVQSSGEHGVVVFSLGSMVSSMTEEKANAIAWALAQIPQKVLWKFDGKTPATLGPNTRVYKWLPQNDLLGHPKTKAFVTHSGANGVYEAIYHGIPMVGIPMFGEQHDNIAHMVAKGAAVTLNIRTMSKSDLFNALKEIINNPFYKKNAVWLSTIHHDQPMKPLDKAVFWIEFVMRHKGAKHLRPLGHDLPWYQYHSLDVIGFLLTCSAVIAVLTVKCFLFIYRLFVKKEKKMKNE

SEQ ID NO: 1855 - protein, 537 aa, Homo sapiens
MLQLSLSRLGMGSLTASPWHLLLLGGASWILARILAWIYTFYDNCCRLRCFPQPPKPSWFWGHLTLMKNNEEGMQFIAHLGRNFRDIHLSWVGPVYPILRLVHPNVIAPLLQASAAVAPKEMTLYGFLKPWLGDGLLMSAGEKWNHHRRLLTPAFHFDILKSYVKIFNKSVNTMHAKWQRLTAKGSARLDMFEHISLMTLDSLQKCIFSFDSNCQESNSEYIAAILELSSLIVKRQRQPFLYLDFLYYLTADGRRFRKACDVVHNFTDAVIRERRSTLNTQGVDEFLKARAKTKTLDFIDVLLLAKDEHGKGLSDVDIRAEADTFMFGGHDTTASALSWILYNLARHPEYQERCRQEVRELLRDREPEEIEWDDLAQLPFLTMCIKESLRLHPPVLLISRCCSQDIVLPDGRVIPKGNICVISIFGVHHNPSVWPDPEVYNPFRFDPENPQKRSPLAFIPFSAGPRNCIGQTFAMSEIKVALALTLLRFCVLPDDKEPRRKPELILRAEGGLWLRVEPLSTVTSQLPWDLLAHPPTS

SEQ ID NO: 1856 - protein, 308 aa, Homo sapiens
MASSHNVLMRLVASAYSIAQKAGTIVRCVIAEGDLGIVQKTSATDLQTKADRMVQMSICSSLSRKFPKLTIIGEEDLPPGEVDQELIEDGQSEEILKQPCPSQYSAIKEEDLVVWVDPVDGTKEYTEGLLDNVTVLIGIAYEGKAIAGIINQPYYNYQAGPDAVLGRTIWGVLGLGAFGFQLKEAPAGKHIITTTRSHSNKLVTDCIAAMNPDNVLRVGGAGNKIIQLIEGKASAYVFASPGCKKWDTCAPEVILHAVGGKLTDIHGNPLQYDKEVKHMNSAGVLAALRNYEYYASRVPESVKSALIP

SEQ ID NO: 1857 - protein, 295 aa, Homo sapiens
MEHQLLCCEVETIRRAYPDTNLLNRPGLRAMLKTEETCAPSVSYFKCVQREIVPSMRKIVATWMLEVCEEQKCEEEVFPLAMNYLDRFLSLEPLKKSRLQLLGATCMFVASKMKETIPLTAEKLCIYTDNSIRPEELLQMELLLVNKLKWNLAAMTPHDFIEHFLSKMPEADENKQIIRKHAQTFVALCATDVKFISNPPSMVAAGSVVAAMQGLNLGSPNNFLSCYRTTHFLSRVIKCDPDCLRACQEQIEALLESSLRQAQQNIDPKATEEEGEVEEEAGLACTPTDVRDVDI

SEQ ID NO: 1858 - protein, 295 aa, Homo sapiens; identical to SEQ ID NO: 1857

SEQ ID NO: 1859 - protein, 295 aa, Homo sapiens; identical to SEQ ID NO: 1857

SEQ ID NO: 1860 - protein, 499 aa, Homo sapiens
MAQFVFESDLHSLLQLDAPIPNAPIARWQRKAKEATGPAPSPMRAANRSHSAGRTPGRTPGKSNSKVQTTPSKPGGDRYIPQRSASQMEVASFLLSKENQPEDGGTPTKKEHQKAWARNLNGFDVEEAKILRLSGKPQNAPEGYQNRLKVLYSQKATPGSSRKACRYIPSLPDRILDAPEIRNDYYLNLVDWSSGNVLAVALDNSVYLWNAGSGDILQLLQMEQPGDYISSVAWIKEGNYLAVGTSNAEVQLWDVQQQKRLRNMTSHSARVSSLSWNSYILSSGSRSGHIHHHDVRVAEHHVATLSGHSQEVCGLRWAPDGRHLASGGNDNIVNVWPSGPGESGWVPLQTFTQHQGAVKAVAWCPWQSNILATGGGTSDRHIRIWNVCSGACLSAVDVHSQVCSILWSPHYKELISGHGFAQNQLVIWKYPTMAKVAELKGHTARVLSLTMSPDGATVASAAADETLRLWRCFELDPALRREREKASTSKSSLIHQGIR

SEQ ID NO: 1861 - protein, 292 aa, Homo sapiens
MTQQPPDVEEDDCLSEYHHLFCPDLLQDKVAFITGGGSGIGFRIAEIFMRHGCHTVIVSRSLPRVSEAAKKLVAATGKRCLPLSMDVRVPPAVMAAVDQALKEFGKIDILINCAAGNFLCPASALSFNAFKTVVDIDTLGTFNVSRVLYEKFFRDHGGVIVNITATLSMRGQVLQLHAGAAKAAVDAMTRHLAVEWGPQNIRVNSLAPGAISGTEGLRRLGGPKASSKFKYLSSPIPRLGTKTEIAHSVLYLASPLASYVSGIVLVVDGGSWMTLPNDIGRLLEFESSSAKL

SEQ ID NO: 1862 - protein, 292 aa, Homo sapiens; identical to SEQ ID NO: 1861

SEQ ID NO: 1863 - protein, 1268 aa, Homo sapiens
MSSVAVLTQESFAEHRSGLVPQQIIVATLNSEEESDPPTYKDAFPPLPEKAACLESAQEPAGAWSNKIRPIKASVITQVFHVPLEERKYKDMNQFGEGEQAKICLEIMQRTGAHLELSLAKDQGLSIMVSGKLDAVMKARKDIVARLQTQASATVPIPKEHHRFVIGKNGEKLQDLELKTATKIQIPRPDDPSNQIKITGTKEGIEKARHEVLLISAEQDKRAVKRLEVEKAFHPFIAGPYNRLVGEIMQETGTRINIPPPSVNRTEIVFTGEKEQLAQAVARIKKIYEEKKKKTTTIAVEVKKSQHKYVIGPKGNSLQEILERTGVSVEIPPSDSISETVILRGEPEKLGQALTEVYAKANSFTVSSVSAPSWLHRFIIGKKGQNLAKITHQMPKVHIEFTEGEDKITLEGPTEDVNVAQEQIEGMVKDLINRMDYVEINIDHKFHRHLIGKSGANINRIKDQYKVSVRIPPDSEKSNLIRIEGDPQGVQQAKRELLELASRMENERTKDLIIEQRFHRTIIGQKGERIREIRDKFPEVIINFPDPAQKSEIVQLRGPKNEVEKCTKYMQKMVADLVENSYSISVPIFKQFHKNIIGKGGANIKKIREESNTKIDLPAENSNSETIVITGKRANCEAARSRILSIQKDLANIAEVEVSIPAKLHNSLIGTKGRLIRSIMEECGGVHIHFPVEGSGSDTVVIRGPSSDVEKAKKQLLHLAEEKQTKSFTVDIRAKPEYHKFLIGKGGGKIRKVRDSTGARIIFPAAEDKDQDLITIIGKEDAVREAQKELEALIQNLDNVVEDYMLVDPRHHRHFVIRRGQVLREIAEEYGGVMVSFPRSGTQSDKVTLKGAKDCVEAAKKRIQEIIEDLEAQVTLECAIPQKFHRSVMGPKGSRIQQITRDYNVQIKFPDREENPVHSVEPSIQENGDEAGEGREAKETDPGSPRRCDIIVISGRKEKCEAAKEALEALVPVTIEVEVPFDLHRYIIGQKGSGIRKMMDEFEVNIHVPAPELQSHTIAITGLAANLDRAKAGLLDRVKELQAEQEDRALRSFKLSVTVDPKYHPKIIGGKGAVITQIRLEHDVNIQFPDKDDGNQPQDQITITGYEKNTEAARDAILKIVGELEQMVSEDVPLDHRVHARIIGARGKAIRKIMDEFKVDIRFPQSGAPDPNCVTVTGLPENVEEAIDHILNLEEEYLADVVDSEALQVYMKPPAHEESKAPSKGFVVRDAPWTSNSSEKAPDMSSSEEIPTFGAQVAPKTLPWGPKR

SEQ ID NO: 1864 - protein, 473 aa, Homo sapiens
MRAGLGPIITLALVLEVAWASELKPTAPPIFTGRPFVVAWNVPTQECAPRHKVPLDLRAFDVEATPNEGFFNQNITTFYYDRLGLYPRFDAAGMSVHGGVPQNGSLCAHLPMLKEAVERYIQTQEPAGLAVIDWEEWRPVWVRNWQEKDVYRQSSRQLVASRHPDWPSDRIVKQAQYEFEFAARQFMLNTLRYVKAVRPQHLWGFYLFPDCYNHDYVQNWDSYTGRCPDVEVAQNDQLAWLWAENTALFPSVYLDKTLASSKHSRNFVSFRVQEALRVAHTHHANHALPVYVFTRPTYTRRLTELNQMDLISTIGESAALGSAGVIFWGDSVYASSMENCQNLKKYLTQTLVPYIVNVSWATQYCSWTQCHGHGRCVRRNPSASTFLHLSPSSFRLVPGRTPSEPQLRPEGELSEDDLSYLQMHFRCHCYLGWGGEQCQWNHKRAAGDASRAWAGAHLASLLGLVAMTLTWTL

SEQ ID NO: 1865 - protein, 485 aa, Homo sapiens
MLLTQLHCPYLLLLLVVLSCLPKAPSAQVMDFLFEKWKLYSDQCHHNLSLLPPPTELVCNRTFDKYSCWPDTPPNTTANISCPWYLPWYHKVQHRLVFKRCGPDGQWVRGPRGQSWRDASQCQMDDDEIEVQKGVAKMYSSYQVMYTVGYSLSLGALLLALVILLGLRKLHCTRNYIHGNLFASFVLKAGSVLVIDWLLKTRYSQKIGDDLSVSVWLSDGAVAGCRVATVIMQYGIIANYCWLLVEGVYLYSLLSITTFSEKSFFSLYLCIGWGSPLLFVIPWVVVKCLFENVQCWTSNDNMGFWWILRIPVLLAILINFFIFVRIIHLLVAKLRAHQMHYADYKFRLARSTLTLIPLLGVHEVVFAFVTDEHAQGTLRSTKLFFDLFFSSFQGLLVAVLYCFLNKEVQAELLRRWRRWQEGKALQEERMASSHGSHMAPAGTCHGDPCEKLQLMSAGSSSGTGCEPSAKTSLASSLPRLADSPT

SEQ ID NO: 1866 - protein, 608 aa, Homo sapiens
MRHLKLTGFIFFLLSLTESLALPTKPQDVDHFNATQKFINENVAYLTIIASAQYVQEASFEEVEMLVKVMLDYKDRCLADSTLPECSKIANDAIQDMLCDMKGLPQKHNFSHCCRQAGFQRRLCFFYNKKANVGFLPPFPTLDPEEKCQAYKNNSESFLNLYMYEVARRNPFAFAPVLLNVAARFEEAATTCCEQQQKATYFQDKAAPITQYLKALSSYQRNVCGALLKFGPKTLNSINIAVFSKKFPKIGFEDLTSLLEDVSSMYDGCCEGDVVQCIRSQSQVMHHICSKQDSISSKIKACCEKKLPERADCIINANKDDRPEDLSLRTPKFTDSENVCQERDSEQDKFFAEFLYDYSRRHTELSTPELLRITKVYKDLLEDCCNRKNPLSCYRHAEDKFNETTERSLAMVQQECKQFQELGKDALQRHFLVKFTKAAPQLPMEELVSLSKEMVAALATCCTLSDEFACVDNLADLVLGELCGMNKNRTINPTVDHCCRADFAFRRPCFEHLKADTTYALPSVSALVSALRADWCQPLKEDLQNKRHRFLVNLVKWMPEITDEERLCLFTKFTAAGEECGNIQKPEACFSPESSKTGDVSQDAEKQR

SEQ ID NO: 1867 - protein, 500 aa, Homo sapiens
MELLAGTGLWPMAIFTVIFILLVDLMHRRQRWTSRYPPGPVPWPVLGNLLQVDLCNMPYSMYKLQNRYGDVFSLQMGWKPVVVINGLKAVQELLVTCGEDTADRPEMPIFQHIGYGHKAKGVVLAPYGPEWREQRRFSVSTLRNFGVGKKSLEQWVTDEASHLCDALTAEAGRPLDPYTLLNKAVCNVIASLIYARRFDYGDPDFIKVLKILKESMGEQTGLFPEVLNMFPVLLRIPGLADKVFPGQKTFLTMVDNLVTEHKKTWDPDQPPRDLTDAFLAEIEKAKGNPESSFNDANLRLVVNDLFGAGMVTTSITLTWALLLMILHPDVQCRVQQEIDEVIGQVRHPEMADQAHMPFTNAVIHEVQRFADIVPMNLPHKTSRDIEVQGFLIPKGTTLIPNLSSVLKDETVWEKPLRFHPEHFLDAQGNFVKHEAFMPFSAGRRACLGEPLARMELFLFFTCLLQRFSFSVPTGQPRPSDYGVFAFLLSPSPYQLCAFKR

SEQ ID NO: 1868 - protein, 508 aa, Homo sapiens
MQRLLAPARRVLQVKRVMQESSLSPAHLLPAAQQRFSTIPPAPLAKTDTWPKDVGILALEVYFPAQYVDQTDLEKFNNVEAGKYTVGLGQTRMGFCSVQEDINSLCLTVVQRLMERTKLPWDAVGRLEVGTETIIDKSKAVKTVLMELFQDSGNTDIEGIDTTNACYGGTASLFNAANWMESSYWDGRYALVVCGDIAVYPSGNPRPTGGAGAVAMLIGPKAPLVLEQGLRGTHMENAYDFYKPNLASEYPLVDGKLSIQCYLRALDRCYAAYRRKIQNQWKQAGNNQPFTLDDVQYMIFHTPFCKMVQKSLARLMFNDFLSSSSDKQNNLYKGLEAFKGLKLEETYTNKDVDKALLKASLDMFNKKTKASLYLSTNNGNMYTSSLYGCLASLLSHHSAQELAGSRIGAFSYGSGLAASFFSFRVSKDASPGSPLEKLVSSVSDLPKRLDSRRRMSPEEFTEIMNQREQFYHKVNFSPPGDTSNLFPGTWYLERVDEMHRRKYARRPV

SEQ ID NO: 1869 - protein, 508 aa, Homo sapiens; identical to SEQ ID NO: 1868

SEQ ID NO: 1870 - protein, 444 aa, Homo sapiens
MREIVHIQAGQCGNQIGAKFWEVISDEHGIDPTGTYHGDSDLQLDRISVYYNEATGGKYVPRAILVDLEPGTMDSVRSGPFGQIFRPDNFVFGQSGAGNNWAKGHYTEGAELVDSVLDVVRKEAESCDCLQGFQLTHSLGGGTGSGMGTLLISKIREEYPDRIMNTFSVVPSPKVSDTVVEPYNATLSVHQLVENTDETYCIDNEALYDICFRTLKLTTPTYGDLNHLVSATMSGVTTCLRFPGQLNADLRKLAVNMVPFPRLHFFMPGFAPLTSRGSQQYRALTVPELTQQVFDAKNMMAACDPRHGRYLTVAAVFRGRMSMKEVDEQMLNVQNKNSSYFVEWIPNNVKTAVCDIPPRGLKMAVTFIGNSTAIQELFKRISEQFTAMFRRKAFLHWYTGEGMDEMEFTEAESNMNDLVSEYQQYQDATAEEEEDFGEEAEEEA

SEQ ID NO: 1871 - protein, 522 aa, Homo sapiens
MPQLDLSWLGLRLETSLPWLLLLLIGASWLLVRVLTQTYIFYRTYQHLCDFPQPPKWNWFLGHLGMITPTEQGLKQVTKLVATYPQGFMTWLGPILPIITLCHPDVIRSVLSASASVALKEVIFYSFLKPWLGDGLLLSDGDKWSCHRRMLTPAFHFNILKPYVKIFNDSTNIMHAKWQDLASGGSARLDMFKNISLMTLDSLQKCVFSFDSNCQEKPSEYISAILELSALVAKRYQQLLLHTDSLYQLTHNGRRFHKACKLVHNFTDAVIQGRRRALPSQHEDDILKAKARSKTLDFIDVLLLTKDEDGKELSDEDIRAEADTFMFEGHDTTASGLSWILYNLARHPEYQERCRQEVRELLRDRESTEIEWDDLAQLPFLTMCIKESLRLHPPVTVISRRCTQDIVLPDGRVIPKGVICIINIFATHHNPTVWPDPEVYDPFRFDPENIKDRSPLAFIPFSAGPRNCIGQTFAMNEMKVALALTLLRFRVLPDDKEPRRKPELILRAEGGLWLRVEPLSTQ

SEQ ID NO: 1872 - protein, 320 aa, Homo sapiens
MSSCNFTHATFMLIGIPGLEEAHFWFGFPLLSMYAVALFGNCIVVFIVRTERSLHAPMYLFLCMLAAIDLALSTSTMPKILALFWFDSREITFDACLAQMFFIHALSAIESTILLAMAFDRYVAICHPLRHAAVLNNTVTVQIGMVALVRGSLFFFPLPLLIKRLAFCHSNVLSHSYCVHQDVMKLAYTDTLPNVVYGLTAILLVMGVDVMFISLSYFLIIRAVLQLPSKSERAKAFGTCVSHIGVVLAFYVPLIGLSVVHRFGNSLDPIVHVLMGDVYLLLPPVINPIIYGAKTKQIRTRVLAMFKISCDKDIEAGGNT

SEQ ID NO: 1873 - protein, 529 aa, Homo sapiens
MSMKQTSVFLLIQLICYFRPGACGKVLVWPTEYSHWINIKIILNELAQRGHEVTVLVSSASILIEPTKESSINFEIYSVPLSKSDLEYSFAKWIDEWTRDFETLSIWTYYSKMQKVFNEYSDVVENLCKALIWNKSLMKKLQGSQFDVILADAVGPCGELLAELLKTPLVYSLRFCPGYRCEKFSGGLPLPPSYVPVVLSELSDRMTFVERVKNMLQMLYFDFWFQPFKEKSWSQFYSDVLGRPTTLTEMMGKADIWLIRTFWDLEFPHPFLPNFDFVGGLHCKPAKPLPREMEEFVQSSGEHGVVVFSLGSMVKNLTEEKANVVASALAQIPQKVVWRFDGKKPDTLGSNTRLYKWIPQNDLLGHPKTKAFVAHGGTNGIYEAIYHGIPIVGIPLFADQPDNINHMVAKGAAVRVDFSILSTTGLLTALKIVMNDPSYKENAMRLSRIHHDQPVKPLDRAVFWIEYVMRHKGAKHLRSTLHDLSWFQYHSLDVIGFLLLCVVGVVFIITKFCLFCCRKTANMGKKKKE

SEQ ID NO: 1874 - protein, 203 aa, Homo sapiens
MAEGQVLVLDGRSHLLGRLAAIVAKQVLLGRKVVVVRCEGINISGNFYRNKLKYLAFLRKRMNTNPSRGPYHFRAPSRIFWRTVRGMLPHKTKRGQAALERLKVLDGIPPPYDKKKRMVVPAALKVVRLKPTRKFAYLGRLAHEVGWKYQAVTATLEEKRKEKAKIHYRKKKQLLRLRKQAEKNVEKKICKFTEVLKTNGLLV

SEQ ID NO: 1875 - protein, 161 aa, Homo sapiens
MSVTLHTDVGDIKIEVFCERTPKTCENFLALCASNYYNGCVFHRNIKGFMVQTGDPTGTGRGGSSIWGKKFEDEYSEYLKHNVRGVVSMANNGPNTNGSQFFITYGKQPHLDMKYTVFGKVIDGLETLDELEKLPVNEKTYRPLNDVHIKDITIHANPFAQ

SEQ ID NO: 1876 - protein, 285 aa, Homo sapiens
MDSNRTVVHVLSRTLYHMLLWTAVLNLVAESHAGLPKAVVKLEPPWIQVLKEDTVTLMCEGTHNTKNCSTQWFHNGSSIWHQAQANYTFKATVNDSGEYRCRMEETGISEPIHLGVISDWLLLQTSQLVFEEGETITLRCHSWKNKQLTKVLLFQNGKPVRYYHQSSNFSIPKANHSHSGNYYCKAYLGRTMHVSKPVTITVQEPKSSSSLPVLTIVAAVAGIAVAAIVIILVSLVYLKKKQVPDTPSGLEEAEKNEVENTITYSLLKHPEAPDEESDHDYQNHI

SEQ ID NO: 1877 - protein, 733 aa, Homo sapiens
MPEETQTQDQPMEEEEVETFAFQAEIAQLMSLIINTFYSNKEIFLRELISNSSDALDKIRYESLTDPSKLDSGKELHINLIPNKQDRTLTIVDTGIGMTKADLINNLGTIAKSGTKAFMEALQAGADISMIGQFGVGFYSAYLVAEKVTVITKHNDDEQYAWESSAGGSFTVRTDTGEPMGRGTKVILHLKEDQTEYLEERRIKEIVKKHSQFIGYPITLFVEKERDKEVSDDEAEEKEEKEEEKEKEEKESDDKPEIEDVGSDEEEEEKKDGDKKKKKKIKEKYIDQEELNKTKPIWTRNPDDITNEEYGEFYKSLTNDWEEHLAVKHFSVEGQLEFRALLFVPRRAPFDLFENRKKKNNIKLYVRRVFIMDNCEELIPEYLNFIRGVVDSEDLPLNISREMLQQSKILKVIRKNLVKKCLELFTELAEDKENYKKFYEQFSKNIKLGIHEDSQNRKKLSELLRYYTSASGDEMVSLKDYCTRMKENQKHIYFITGETKDQVANSAFVERLRKHGLEVIYMIEPIDEYCVQQLKEFEGKTLVSVTKEGLELPEDEEEKKKQEEKKTKFENLCKIMKDILEKKVEKVVVSNRLVTSPCCIVTSTYGWTANMERIMKAQALRDNSTMGYMAAKKHLEINPDHSIIETLRQKAEADKNDKSVKDLVILLYETALLSSGFSLEDPQTHANRIYRMIKLGLGIDEDDPTVDDTSAAVTEEMPPLEGDDDTSRMEEVD

SEQ ID NO: 1878 - protein, 733 aa, Homo sapiens; identical to SEQ ID NO: 1877

SEQ ID NO: 1879 - protein, 502 aa, Homo sapiens
MLVTAGSLLGAIWTVLHLRILLLAAVTFLFLADFLKHRRPKNYPPGPWRLPLVGCLFHLDPKQPHLSLQQFVKKYGNVLSLDFANIPSVVVTGMPLIKEIFTQMEHNFLNRPVTLLRKHLFNKNGLIFSSGQTWKEQRRFALMTLRNFGLGKKSLEQRIQEEAYHLVEAIKDEGGLPFDPHFNINKAVSNIICSVTFGERFEYHDSQFQEMLRLLDEAMCLESSMMCQLYNIFPRILQYLPGSHQTLFSNWRKLKLFISDIIKNHRRDWDPDEPRDFIDAFLKEMAKYPDKTTTSFNEENLICSTLDLFFAGTETTSTTLRWALLCMALYPEVQEKMQAEIDRVIGQGRQPNLADRDSMPYTNAVIHEVQRIGNIIPFNVPREVAVDTYLAGFNLPKGTMILTNLTALHRDPKEWATPDTFNPEHFLENGQFKKRESFLPFSMGKRACLGEQLARSELFIFITSLIQKFTFKPPVNEKLSLQFRMSVTISPVSHRLCAIPRL

SEQ ID NO: 1880 - protein, 509 aa, Homo sapiens
MSVSALSSTRFTGSISGFLQVASVLGLLLLLVKAVQFYLQRQWLLKAFQQFPSPPFHWFFGHKQFQGDKELQQIMTCVENFPSAFPRWFWGSKAYLIVYDPDYMKVILGRSDPKANGVYRLLAPWIGYGLLLLNGQPWFQHRRMLTPAFHYDILKPYVKNMADSIRLMLDKWEQLAGQDSSIEIFQHISLMTLDTVMKCAFSHNGSVQVDGNYKSYIQAIGNLNDLFHSRVRNIFHQNDTIYNFSSNGHLFNRACQLAHDHTDGVIKLRKDQLQNAGELEKVKKKRRLDFLDILLLARMENGDSLSDKDLRAEVDTFMFEGHDTTASGVSWIFYALATHPEHQQRCREEVQSVLGDGSSITWDHLDQIPYTTMCIKEALRLYPPVPGIVRELSTSVTFPDGRSLPKGIQVTLSIYGLHHNPKVWPNPEVFDPSRFAPDSPRHSHSFLPFSGGARNCIGKQFAMSEMKVIVALTLLRFELLPDPTKVPIPLPRLVLKSKNGIYLYLKKLH

SEQ ID NO: 1881 - protein, 509 aa, Homo sapiens; identical to SEQ ID NO: 1880

SEQ ID NO: 1882 - protein, 509 aa, Homo sapiens; identical to SEQ ID NO: 1335

SEQ ID NO: 1883 - protein, 439 aa, Homo sapiens
MASLTVKAYLLGKEEAAREIRRFSFCFSPEPEAEAAAGPGPCERLLSRVAVLFPALRPGGFQAHYRDEDGDLVAFSSDEELTMAMSYVKDDIFRIYIKEKKECRREHRPPCAQEARSMVHPNVICDGCNGPVVGTRYKCSVCPDYDLCSVCEGKGLHREHSKLIFPNPFGHLSDSFSHSRWLRKLKHGHFGWPGWEMGPPGNWSPRPPRAGDGRPCPTAESASAPSEDPNVNFLKNVGESVAAALSPLGIEVDIDVEHGGKRSRLTPTSAESSSTGTEDKSGTQPSSCSSEVSKPDGAGEGPAQSLTEQMKKIALESVGQPEELMESDNCSGGDDDWTHLSSKEVDPSTGELQSLQMPESEGPSSLDPSQEGPTGLKEAALYPHLPPEADPRLIESLSQMLSMGFSDEGGWLTRLLQTKNYDIGAALDTIQYSKHPPPL

SEQ ID NO: 1884 - protein, 218 aa, Homo sapiens
MPMTLGYWDIRGLAHAIRLFLEYTDTSYEDKKYSMGDAPDYDRSQWLSEKFKLGLDFPNLPYLIDGSHKITQSNAILRYLGRKHNLCGETEEERIRVDVLENQAMDTRLQLAMVCYSPDFERKKPEYLEGLPEKMKLYSEFLGKQPWFAGNKITYVDFLVYDVLDQHRIFEPKCLDAFPNLKDFVARFEGLKKISDYMKSGRFLSKPIFAKMAFWNPK

SEQ ID NO: 1885 - protein, 322 aa, Homo sapiens; identical to SEQ ID NO: 1251

SEQ ID NO: 1886 - protein, 724 aa, Homo sapiens; identical to SEQ ID NO: 1191

SEQ ID NO: 1887 - protein, 446 aa, Homo sapiens
MAPNTSTMDEAGLPAERDFSFRILTACFLSLLILSTLLGNTLVCAAVIRFRHLRSKVTNFFVISLAVSDLLVAVLVMPWKAVAEIAGFWPFGSFCNIWVAFDIMCSTASILNLCVISVDRYWAISSPFQYERKMTPKAAFILISVAWTLSVLISFIPVQLSWHKAKPTWPLDGNFTSLEDTEDDNCDTRLSRTYAISSSLISFYIPVAIMIVTYTSIYRIAQKQIRRISALERAAVHAKNCQTTAGNGNPVECAQSESSFKMSFKRETKVLKTLSVIMGVFVCCWLPFFISNCMVPFCGSEETQPFCIDSITFDVFVWFGWANSSLNPIIYAFNADFQKAFSTLLGCYRLCPTTNNAIETVSINNNGAVVFSSHHEPRGSISKDCNLVYLIPHAVGSSEDLKKEEAGGIAKPLEKLSPALSVILDYDTDVSLEKIQPVTHSGQHST

SEQ ID NO: 1888 - protein, 530 aa, Homo sapiens; identical to SEQ ID NO: 1257

SEQ ID NO: 1889 - protein, 530 aa, Homo sapiens; identical to SEQ ID NO: 1257

SEQ ID NO: 1890 - protein, 202 aa, Homo sapiens
MAPVCLFAPLLLLLLGGFPVAPGESIRETEVIDPQDLLEGRYFSGALPDDEDAGGLEQDSDFELSGSGDLDDTEEPRTFPEVISPLVPLDNHIPENAQPGIRVPSEPKELEENEVIPKRVPSDVGDDDVSNKVSMSSTSQGSNIFERTEVLAALIVGGVVGILFAVFLILLLVYRMKKKDEGSYDLGKKPIYKKAPTNEFYA

SEQ ID NO: 1891 - protein, 202 aa, Homo sapiens; identical to SEQ ID NO: 1890

SEQ ID NO: 1892 - protein, 254 aa, Homo sapiens; identical to SEQ ID NO: 1209

SEQ ID NO: 1893 - protein, 254 aa, Homo sapiens; identical to SEQ ID NO: 1209

SEQ ID NO: 1894 - protein, 654 aa, Homo sapiens; identical to SEQ ID NO: 1334

SEQ ID NO: 1895 - protein, 274 aa, Homo sapiens; identical to SEQ ID NO: 1231

SEQ ID NO: 1896 - protein, 274 aa, Homo sapiens; identical to SEQ ID NO: 1231

SEQ ID NO: 1897 - protein, 411 aa, Homo sapiens
MRFAWTVLFLGQLQFCPLLRCAPQAPREPPAAPGAWRQTIQWENNGQVFSLLSLGAQYQPQRRRDSSATAPRADGNAAAQPRTPILLLRDNRTASARARTPSPSGVAAGRPRPAARHWFQVGFSPSGAGDGASRRAANRTASPQPPQLSNLRPPSHVDRMVGDDPYNPYKYSDDNPYYNYYDTYERPRSGSRHRPGYGTGYFQYGLPDLVPDPYYIQASTYVQKMSMYNLRCAAEENCLASSAYRADVRDYDHRVLLRFPQRVKNQGTSDFLPSRPRYSWEWHSCHQHYHSMDEFSHYDLLDASTQRRVAEGHKASFCLEDTSCDYGYHRRFACTAHTQGLSPGCYDTYAADIDCQWIDITDVQPGNYILKVSVNPSYLVPESDYSNNVVRCEIRYTGHHAYASGCTISPY

SEQ ID NO: 1898 - protein, 135 aa, Homo sapiens
MASLKDLEGKWRLVESHGFEDYMKELGVGLALRKMGAMAKPDCIITLDNNNLTVKTESTVKTTVFSCTLGEKFDETTADGRKTETVCTFTDGALVQHQKWEGKESTITRKLKDGKMVVECVMNNAICTRVYEKVQ

SEQ ID NO: 1899 - protein, 221 aa, Homo sapiens; identical to SEQ ID NO: 1304

SEQ ID NO: 1900 - protein, 483 aa, Homo sapiens
MSVRVTQKSYKMSTSGPRAFSSRSFTSGPGARISSSSFSRVGSSSSSFRGSLGGFGGAGVGGITAVTVNQSLLNPLKLEVDPNIQAVRTQEKEQIKTLNNKFASFIDKVRFLEQQNKMLETKWSLLQQQKTSRSNMDNMFESYINNLRRQLEALGQEKLKLEVELGNMQGLVEDFKNKYEDEINKRTEMENEFVLIKKDVDEAYMNKVELESRLEGLTDEINFLRQIHEEEIRELQSQISDTSVVLSMDNSRSLDMDSIIAEVRAQYEEIANRSRAEAETMYQIKYEELQTLAGKHGDDLRRSKTEISEMNRNISRLQAEIDALKGQRATLEAAIADAEQRGELAVKDANAKLEDLKNALQKAKQDMARQLREYQELMNVKLALDIEIATYRKLLEGEESRLESGMQNMSIHTKTTSGYAGGLSSSYGGLTSPGFSYGMSSFQPGFGSVGGSSTYSRTKAVVVKKIETRDGKLVSESSDIMSK

SEQ ID NO: 1901 - protein, 295 aa, Homo sapiens; identical to SEQ ID NO: 1379

SEQ ID NO: 1902 - protein, 248 aa, Homo sapiens; identical to SEQ ID NO: 1117

SEQ ID NO: 1903 - protein, 322 aa, Homo sapiens; identical to SEQ ID NO: 1243

SEQ ID NO: 1904 - protein, 349 aa, Homo sapiens
MQGLGALFLLLTACLTLKADNVPTLPDIQVQENFNEARIYGKWFNLAVGSTCPWLRRIKNKMSVSTLVLQEGATEAEISVTSTQWRKGVCEEISGVYQKTDIDGKFLYHKSKWNATLESYVVHTNYDEYAIFLTKKFSHRHGPTITAKLYGREPQLRDSLLQEFREVALSVGIPENSIVFMADRGECVPGDREVESTSFARARRAVLPQENEGSGSEPLITGTLKKEDSCQLNYSEGPCLGMQQKYYYNGASMACETFQYGGCLGNGNNFASEKECLQTCRTIAACNLPIVQGPCRAFAELWAFDAAQGKCIQFIYGGCKGNGNKFYSEKECKEYCGVPGDGYEELTRS

SEQ ID NO: 1905 - protein, 349 aa, Homo sapiens; identical to SEQ ID NO: 1904

SEQ ID NO: 1906 - protein, 687 aa, Homo sapiens
MEQSYGGYGAWSAGPANTQGTYGSGVASWQGYENYSYYNAQNTSVPTGTPYSYGPASWEATKASDGGLAAGSSAMHVASFAPEPCTDNSDSLIAKINQRLDMLSKEGGRGGISSGGEGMQDRDSSFRFQPYESYDSRPCMPEHTPYRPSYSYDYDFDLGTDRNGSFGGTFNDCRDPTPERGALDGFLRGRGQGRFQDRSNSSTFIRSDPFMPPSASSEPLSTTWSELNYMGGRGLGGPSTNRPPPSLFSQSMAPDYSMMGMQGVGGFGGTMPYGCGRSQTRIRDWPRRRGFERFGPDNMGRKRKPFPLYEEPDAKLARADSEGDLSENDDGAGDLRSGDEEFRGEDDLCDSRKQRGEKEDEDEDVKKRREKQRRRDRMRDRAADRIQFACSVCKFRSFEDEEIQKHLQSKFHKETLRFISTKLPDKTVEFLQEYIINRNKKIEKRRQELLEKESPKPKPDPFKGIGQEHFFKRIEAAHCLACDMLIPAQHQLLQRHLHSVDHNHNRRLAAEQFKKTSLHVAKSVLNNKHIVKMLEKYLKGEDPFVNETADLETEGDENLGEEKETPEEVAAEVLAEVITAAVKAVEGDGEPAAEHSDVLAEVEGPVDTAEAGSDSHTGKLLEEQTCETASETRNMEDMARGEAAEARNEAAVPAAAAGSPVPVIAIPGILEDELEQTDAEAKDTPTE

SEQ ID NO: 1907 - protein, 132 aa, Homo sapiens
MVDAFCATWKLTDSQNFDEYMKALGVGFATRQVGNVTKPTVIISQEGGKVVIRTQCTFKNTEISFQLGEEFEETSIDDRNCKSVIRLDGDKLIHVQKWDGKETNCVREIKDGKMVVTLTFGDVVAVRCYEKA

SEQ ID NO: 1908 - protein, 494 aa, Homo sapiens
MELLGFTTLALVVSVTCLSLLSVWTKLRTRGRLPPGPHPPSHYWESTATEPQGHPASLSKLAKEYGPVYTLYFGTSPTVVLHGYDVVKEALLQQGDEFLGRGPLPIIEDTHKGYGLIFSNGERWKVMRRFSLMTLRNFGMGKRSLEERVQEEAWCLVEELQKTKAQPFDPTFILACAPCNVICSILFNDRFQYNDKTFLNLMDLLNKNFQQVNSVWCQMYNLWPTIIKYLPGKHIEFAKRIDDVKNFILEKVKEHQKSLDPANPRDYIDCFLSKIEEEKDNLKSEFHLENLAVCGSNLFTAGTETTSTTLRFGLLLLMKYPEVQAKVHEELDRVIGRHQPPSMKDKMKLPYTDAVLHEIQRYITLVGSSLPHAVVQDTKFRDYVIPKGTTVLPMLSSVMLDQKEFANPEKFDPGHFLDKNGCFKKTDYFVPFSLGKRACVGESLARMELFLFFTTLLQKFSLKTLVEPKDLDIKPITTGIINLPPPYKLCLVPR

SEQ ID NO: 1909 - protein, 479 aa, Homo sapiens
MRHLWLLLLSVSLVQTQAATTDSDKVDLSIARGHRPVDRRKEEPPSLRPAPPPISGGGYRARPAKVDAGQKKVERKPPDAGGCVHGDGDMGVLCATGCELRQTLLNHERPIKNSIAELNSNINSVYETSSVTFQYLTLLKDMWKKKQAQVKDNENVINEYSSILEDQKLYIDETVNDNIPLNLRVLRSILEDLRSKMQKLESDISAQTEYCHTPCTVNCNIPVVSGKECEEIIRKGGETSEMYLIQPDTSSKPYRVYCDMKTENGGWTVIQNRQDGSVDFGRKWDPYKKGFGNIATNEDTKKYCGLPGEYWLGNDKISQLTRIGPTELLIEMEDWKGDKVKAHYGGFTVQTEANKYQVSVNKYKGTAGNALMEGASQLVGENRTMTIHNGMFFSTYDRDNDGWVTTDPRKQCSKEDGGGWWYNRCHAANPNGRYYWGGLYSWDMSKHGTDDGVVWMNWKGSWYSMRRMSMKIRPVFPQQ

SEQ ID NO: 1910 - protein, 675 aa, Homo sapiens
MRVLSVRFRVLLACLALVLPNSETNFLSKERASQVLVRKRRANTLLEETKKGNLERECIEELCNKEEAREVFENNPETDYFYPKYLGCLGAFRVGAFSAARQSANAYPDLRSCVNAIPDQCDPMPCNEDGYLSCKDGQGAFTCICKPGWQGDKCQFDINECKDPSNINGGCSQTCDNTPGSYHCSCKIGFAMLTNKKDCKDVDECSLKPSVCGTAVCKNIPGDFECECPNGYRYDPSSKSCKDVDECSENTCAQLCVNYPGGYSCYCDGKKGFKLAQDQRSCEGIPVCLSLDLDKNYELLYLAEQFAGVVLYLKFRLPDITRFSAEFDFRTYDSEGIILYAESLDHSNWLLIALREGKIEVQFKNEFSTQITTGGNVINNGIWNMVSVEELDDSVSIKIAKEAVMNINKLGSLFKPTDGFLDTKIYFAGLPRKVESALIKPINPRLDGCIRGWNLMKQGALGAKEIVEGKQNKHCFLTVEKGSYYPGSGIAQFSIDYNNVTNAEGWQINVTLNIRPSTGTGVMLALVSGDTVPFALSLVDSGSGTSQDILVFVENSVAAHLEAITLCSEQPSQLKCNINRNGLELWTPVRKDVIYSKDLQRQLAILDKTMKGTVATYLGGVPDISFSATPVNAFYSGCMEVNINGVQLDLDEAISKHNDIRAHSCPSVRKIQKNF

SEQ ID NO: 1911 - protein, 530 aa, Homo sapiens
MPGKWISALLLLQISFCFKSGNCGKVLVWPMEYSHWMNIKIILEELVQKGHEVTVLRPSASVFLDPKETSHLKFVTFPTSFSSHDLENFFTRFVSVWTYELPRDTCLSYFLYLQDTIDEYSDYCLTVCKEAVSNKQFMTKLQESKFDVVFSDAIGPCGELIAELLQIPFLYSLRFSPGYTIEKYIGGVLFPPSYVPMIFSGLAGQMTFIERVHNMICMLYFDFWFQTFREKKWDPFYSKTLGRPTTLAEIMGKAEMWLIRSYWDLEFPHPISPNVDYIGGLHCKPAKPLPKDIEDFVQSSGEHGVVVFSLGSMVRNMTEEKANIIAWALAQIPQKVLWRFDGKKPTTLGPNTRLYKWLPQNDLLGHPKTKAFVTHGGANGIYEAIHHGIPMIGIPLFGEQHDNIAHMVAKGAAATVNFRTMSKSDLLNALEEDIDNPFYKKNAMWLSTIHHDQPTKPLDRAVFWIEFVMRHKGALHLRSLGHNLPWYLYHSLDVIGFLLSCVAVTVVLALKCFLFVYRFFVKKEKKTKNE

SEQ ID NO: 1912 - protein, 304 aa, Homo sapiens
MLRAKMLGRGPYKPLAILRHMGPLCATRPQHWRFQHSYAEKHSNCARHPLWTGPVSSPGGTQQSPINIQWTDSVYDPKLAPLRVSYDAASCRYLWNTGYFFQVEFDDSCEESGISGGPLGNHYRLKQFHFHWGATDEWGSEHMVDGHAYPAELHLVHWNSMKYENYKKATTGENGLAVIGVFLKLGAHHEALQRLVDILPEVRHKDTQVTMGPFDPSCLLPACRDYWTYPGSLTTPPLAESVTWIVHKMPIEVSPSQLSTFRTLLFSGRGEDEEVMVNNFRPLQPLRGRNVRSSFQVPRVGTKS

SEQ ID NO: 1913 - protein, 590 aa, Homo sapiens
MLPRLVTSSAKSSILENMKVLLGFICLIVPLLSLETDKCTEYPNEVISFSSVNEIDIRSCPLTPNEMHGGTIIWYKNDSKTPISADKDSRIHQQNEHLWFVPAKMEDSGYYYCIMRNSTYCLKTKITMSVLENDPGLCYNTQASFIQRLHVAGDGSLVCPYLDFFKDENNELPKVQWYKNCKPLPLDDGNFFGFKNKLMVMNVAEEHRGNYTCRTSYTYQGKQYPVTRVITFITIDDSKRDRPVIMSPRNETMEADPGSTIQLICNVTGQFTDLVYWKWNGSEIEWDDPILAEDYQFLEHPSAKRKYTLITTLNVSEVKSQFYRYPFICFVKNTHILETAHVRLVYPVPDFKNYLIGGFAIFTATAVFCACIYKVFKVDIVLWYRDSCSDFLPRKASDGRTYDAYVLYPKTYGEGSFAYLDTFVFKLLPEVLEGQFGYKLFICGRDDYVGEDTIEVTNENVKRSRRLIIILVRDMGSFSCLGQSSEEQIAIYDALIREGIKIILLELEKIQDYEKMPESIQFIKQKHGAICWSGDFKERPQSAKTRFWKNLRYQMPAQRRSPLSKHHLLTLDPVLDTKEKLQAETHLPLG

SEQ ID NO: 1914 - protein, 503 aa, Homo sapiens [sequence omitted]

SEQ ID NO: 1915 - protein, 452 aa, Homo sapiens
MPEFLEDPSVLTKDKLKSELVANNVTLPAGEQRKDVYVQLYLQHLTARNRPPLAAGANSKGPPDFSSDEEREPTPVLGSGASVGRGRGAVGRKATKKTDKPRPEDKDDLDVTELSNEELLEQLVRYGVNPGPIVGTTRKLYEKKLLKLREQGAESRSSTPLPTVSSSAENTRQNGSNDSDRYSDNDEDSKIELKLEKREPLKGRAKTPVTLKQRRIEHNQSYSEAGVTETEWTSGSSKGGPLQALTRESTRGSRRTPRRRVEPSQHFRVDGAVISESTPIAETIKASSNDSLVANRLTGNFKHASSILPITEFSDITRRTPKKPLTRAEVGEKTEERRVERDILKEMFPYEASTPTGISASCRRPIKGAAGRPLELSDFRMEESFSSKYVPKYVPLADVKSEKTKKGRSVPMWIKMLLFALVAGFLFLVYQAMETNQGNPFTNFLQDTKISN

SEQ ID NO: 1916 - protein, 140 aa, Homo sapiens
ERGDAVQYIPAIIKSKAEPLYELVTATDFAYSSTVKQNMKKALEEFQKEVSSCRCAPCRNNGVPILKESRCECICPVGLQGVACEVTNRKDIPIDGKWSCWSDWSPCSGGRKTRQRQCNNPAPQRGGSPCSGPASETLNC

SEQ ID NO: 1917 - protein, 140 aa, Homo sapiens; identical to SEQ ID NO: 1916

SEQ ID NO: 1918 - protein, 145 aa, Homo sapiens; identical to SEQ ID NO: 1265

SEQ ID NO: 1919 - protein, 465 aa, Homo sapiens
MENRCLPKKVPGFCSFRYGLAILLHFCNIVIMAQRVCLNLTMVAMVNKTEPPHLSNKSVAEMLDNVKNPVHSWSLDIQGLILSSVFLGMVVIQVPVGYLSGAYPMKKIIGSSLFLSSVLSLLIPPAAQVGAALVIVCRVLQGIAQGAVSTGQHGIWVKWAPPLERGRLTSMTLSGFVMGPFIALLVSGFICDLLGWPMVFYIFGIVGCVLSLFWFILFFDDPNNHPYMSSSEKDYITSSLMQQVHSGRQSLPIKAMLKSLPLWAIILNSFAFIWSNNLLVTYTPTFISTTLHVNVRENGLLSSLPYLLAYICGIVAGQMSDFLLSRKIFSVVAVRKLFTTLGIFCPVIFVVCLLYLSYNFYSTVIFLTLANSTLSFSFCGQLINALDIAPRYYGFLKAVTALIGIFGGLISSTLAGLILNQDPEYAWHKNFFLMAGINVTCLAFYLLFAKGDIQDWAKETKTTRL

SEQ ID NO: 1920 - protein, 465 aa, Homo sapiens; identical to SEQ ID NO: 1919

SEQ ID NO: 1921 - protein, 1178 aa, Homo sapiens
MLKFQTVRGGLRLLGVRRSSTAPVASPNVRRLEYKPIKKVMVANRGEIAIRVFRACTELGIRTVAVYSEQDTGQMHRQKADEAYLIGRGLAPVQAYLHIPDIIKVAKENGVDAVHPGYGFLSERADFAQACQDAGVRFIGPSPEVVRKMGDKVEARAIAIAAGVPVVPGTNSPINSLHEAHEFSNTYGFPIIFKAAYGGGGRGMRVVHSYEELEENYTRAYSEALAAFGNGALFVEKFIEKPRHIEVQILGDQYGNILHLYERDCSIQRRHQKVVEIAPATHLDPQLRSRLTSDSVKLAKQVGYENAGTVEFLVDKHGKHYFIEVNSRLQVEHTVTEEITDVDLVHAQIHVSEGRSLPDLGLRQENIRINGCAIQCRVTTEDPARSFQPDTGRIEVFRSGEGMGIRLDNASAFQGAVISPHYDSLLVKVIAHGKDHPTAATKMSRALAEFRVRGVKTNIPFLQNVLNNQQFLAGIVDTQFIDENPELFQLRPAQNRAQKLLHYLGHVMVNGPTTPIPVKVSPSPVDPIVPVVPIGPPPAGFRDILLREGPEGFARAVRNHQGLLLMDTTFRDAHQSLLATRVRTHDLKKIAPYVAHNFNNLFSIENWGGATFDVAMRFLYECPWRRLQELRELIPNIPFQMLLRGANAVGYTNYPDNVVFKFCEVAKENGMDVFRIFDSLNYLPNMLLGMEAAGSAGGVVEAAISYTGDVADPSRTKYSLEYYMGLAEELVRAGTHILCIKDMAGLLKPAACTMLVSSLRDRFPDLPLHIHTHDTSGSGVAAMLACAQAGADVVDVAVDSMSGMTSQPSMGALVACTKGTPLDTEVPLERVFDYSEYWEGARGLYAAFDCTATMKSGNSDVYENEIPGGQYTNLHFQAHSMGLGSKFKEVKKAYVEANQMLGDLIKVTPSSKIVGDLAQFMVQNGLSRAEAEAQAEELSFPRSVVEFLQGYIGIPHGGFPEPFRSKVLKDLPRIEGRPGASLPPLNLKELEKDLIDRHGEEVTPEDVLSAAMYPDVFAQFKDFTATFGPLDSLNTRLFLQGPKIAEEFEVELERGKTLHIKALAVSDLNRAGQRQVFFELNGQLRSILVKDTQAMKEMHFHPKALKDVKGQIGAPMPGKVIDVKVAAGAKVVKGQPLCVLSAMKMETVVTSPMEGTIRKVHVTKDMTLEGDDLILEIE

SEQ ID NO: 1922 - protein, 1178 aa, Homo sapiens; identical to SEQ ID NO: 1921

SEQ ID NO: 1923 - protein, 317 aa, Homo sapiens
MWLYLLALVGLWNLLRLFRERKVVSHLQDKYVFITGCDSGFGNLLARQLDRRGMRVLAACLTEKGAEQLRSKTSDRLETVILDVTKTESIVAATQWVKERVGNTGLWGLVNNAGISGHLGPNEWMNKQNIASVLDVNLLGMIEVTLSTVPLVRKARGRVVNVASIAGRLSFCGGGYCISKYGVEAFSDSLRRELSYFGVKVAIVEPGFFRTDVTNGVTLSSNFQMLWDQTSSEVREVYGENYLASYLKMLNGLDQRCNKDLSLVTDCMEHALTSCHPRTRYSAGWDAKFFYLPMSYLPTFLVDALFYWTSPKPEKAL

SEQ ID NO: 1924 - protein, 1737 aa, Homo sapiens
MRLLWGLAWAFSFFASSLQKPRLLLFSPSVVNLGTPLSVGVQLLDAPAGQEVKGSVYLRNPTSGPCSPKKDFKLSSGNDFVLLRLEVPLEDVRNCGLFDLRRAPHIQLVAYSPWLKNTAPKATETQGVNLLFSSRRGHIFVQTDQPIYNPGQRVRYRVFALDQKMRPSTDTLTVTVENSHGLRVRKKVVFAPTSIFTDDFVIPDISEPGTWKISARFSDGLESNRSTHFEVKKYVLPNFEVKLTPWKPYILTVPSYREEIQLDIQARYVYGKPVQGVAYTRFALMDEQGKKTFLRGLETQTKLVEGQTHISISRDQFQAALGKVNTEIGDLEGLRLYAAVAVIESPGGEMEEAELTSWPFVSSAFSLDLSHTKQHLVPGAPFLLQALVREMSGSEASDVPVKVSATLLSGSDSKVLDFQQNTNGIGQVSFSIHVPPTITELRLLVSAGSLYPAVAKLTVQAPPSRGPGFLSIEPLDLRSPRVGDTFILNLRTVGIPVPTFSHYYYMIISRGQIMAMSREPRTTLTSISVLVDHHLAPSFYFVAYFYHQGLPVANSLLINVQPGDCEGKLELKVDGAKEYRNGESMKLQLQTDSEALVALGAVDTALYAVGGRSHKPLDMSKVFEVMNSYNLGCGPGGGDDALQVFQTAGLAFSDGDRLTQTKEDLSCPKEKISRQKRNVNFQKAISEKLGQYSSPDTKRCCQDGMTKLPMARTCEQRAARVPQPACREPFLSCCKFAEDLRRNQTRSQAGLARAQNVMQEEDLIDEDDILVRSFFPENWLWKVEPVDRSKLLTVWLPDSLTTWEIHGVSLSKSKGLCVAKPTRVRVFREFHLHLRLPISVRRFEQLELRPVLYNYLSEDVTVSVHVSPVEGLCLAGGGLLAQQVSVPAGSARPVAFSVVPTAAASMPLKVVARGSFDIGDAVSKILQIEKEGAIHREEIVYNLDPLNNLGRSLEIPGSSDPNVIPDGDFSSFVRVTASEPLETLGSEGALSPGGVASLLKLPTGCAEQTMVLLAPTLTASRYLDRTEQWSKLPPETKDHAVDLIQKGHMRIQQFRKKDGSFGAWLDRDSSTWLTAFVLKILSLAQEQIGDSPEKLQETAGWLLGQQLDDGSFHDPCPVIQRGMQGGLVGTDETVALTAFVVIALHHGLAVFQDENSQQLKKRVEASIMKANSFLGQKASAGLLGAHASAITAYALTLTKASEDLRNVAHNSLMAMAEETGENLYWGLAIGSQDNVVSSTAAPRNPSEPVPQAPALWIETTAYGLLHLLLREGKGEMADKAATWLTHQGSFQGGFRSTQDTVVALDALSAYWIASHTTEEKALNVTLSSMGRNGYKSHLLQLNNHQVKGLEEELKFSLGSTINVKVGGNSKGTLKILRTYNVLDMKNTTCQDLRIEVTITGYVEYTREANEDYEYDYDMPAADDPSVHSQPVTPLQLFEGRRSRRRREAPKAADEQESRVQYTVCIWRNGNLGLSGMAIADITLLSGFQALRADLEKLTSLSDRYVSHFETDGPHVLLYFDSVPTTRECVGFGALQEVAVGLVQPASAVLYDYYSPDHKCSVFYAGPTKSKLLSTLCSADVCQCAEGKCPRQRRSLERGVEDKDGYRMKFACYYPRVEYGFQVKVLREDSRSAFRLFETKITQVLHFTKDAKASIGQTRNFLVRASCRLRLEPSKEYLIMGMDGVTSDLKGDPQYLLDSNSWIEEMPSERLCRSTRQRAACGQLNDFLQEYRSQGCQV

SEQ ID NO: 1925 - protein, 193 aa, Homo sapiens
MPVWGGGNKCGACGRTVYHAEEVQCDGRTFHRCCFLCMVCRKNLDSTTVAIHDEEIYCKSCYGKKYGPKGYGYGQGAGTLNMDRGERLGIKPESAQPHRPTTNPNTSKFAQKYGGAEKCSRCGDSVYAAEKIIGAGKPWHKNCFRCAKCGKSLESTTLTEKEGEIYCKGCYAKNFGPKGFGYGQGAGALVHAQ

SEQ ID NO: 1926 - protein, 567 aa, Homo sapiens
MLLRTPGLPRRSGMASGVTITLAIAIFALEINAQAPEPTPREEPSADALLPIDCRMSTWSQWSQCDPCLKQRFRSRSMEVFGQFQGKSCADALGDRQHCEPTQECEEVQENCGNDFQCETGRCIKRKLLCNGDNDCGDFSDESDCESDPRLPCRDRVVEESELGRTAGYGINILGMDPLGTPFDNEFYNGLCDRVRDGNTLTYYRKPWNVAFLAYETKADKNFRTENYEEQFEMFKTIVRDRTTSFNANLALKFTITEAPIKKVGVDEVSPEKNSSKPKDSSVDFQFSYFKKENFQRLSSYLSQTKKMFLHVRGMIQLGRFVMRNRGVMLTTTFLDDVKALPVSYEKGEYFGFLETYGTHYSSSGSLGGLYELIYVLDKASMKEKGVELSDVKRCLGFNLDVSLYTPLQTALEGPSLTANVNHSDCLKTGDGKVVNISRDHIIDDVISFIRGGTRKQAVLLKEKLLRGAKTIDVNDFINWASSLDDAPALISQKLSPIYNLIPLTMKDAYAKKQNMEKAIEDYVNEFSARKCYPCQNGGTAILLDGQCMCSCTIKFKGIACEISKQR

SEQ ID NO: 1927 - protein, 374 aa, Homo sapiens
MAAGLDSWNSTINGTWEGDELGYKCRFNEDFKYVLLPVSYGVVCVLGLCLNVVALYIFLCRLKTWNASTTYMFHLAVSDSLYAASLPLLVYYYAQGDHWPFSTVLCKLVRFLFYTNLYCSILFLTCISVHRCLGVLRPLHSLSWGHARYARRVAAVVWVLVLACQAPVLYFVTTSVRGTRITCHDTSARELFSHFVAYSSVMLGLLFAVPFSIILVCYVLMARRLLKPAYGTTGLPRAKRKSVRTIALVLAVFALCFLPFHVTRTLYYSFRSLDLSCHTLNAINMAYKITRPLASANSCLDPVLYFLAGQRLVRFARDAKPATEPTPSPQARRKLGLHRPNRTDTVRKDLSISSDDSRRTESTPAGSETKDIRL

SEQ ID NO: 1928 - protein, 192 aa, Homo sapiens
MDGSGEQLGGGGPTSSEQFMKTGAFLLQGFIQDRAERMAGETPELTLEQPPQDASTKKLSECLRRIGDELDNNMELQRMIADVDTDSPREVFFRVAADMFADGNFNWGRVVALFYFASKLVLKALCTKVPELIRTIMGWTLDFLRERLLVWIQDQGGWEGLLSYFGTPTWQTVTIFVAGVLTASLTIWKKMG

SEQ ID NO: 1929 - protein, 573 aa, Homo sapiens; identical to SEQ ID NO: 1115

SEQ ID NO: 1930 - protein, 1288 aa, Homo sapiens
MGSPEGRFHFAIDRGGTFTDVFAQCPGGHVRVLKLLSEDPANYPDAPTEGIRRILEQEEGVLLPRGRPLDTSRIASIRMGTTVATNALLERQGERVALLVTRGFRDLLHIGTQARPDLFDLAVPMPEVLYEEVLEVDERVVLYRGEPGAGSPVKGRTGDLLEIQQPVDLEALRGKLEGLLSRGIHSLAVVLMHSYTWAQHEQQVGTLARELGFTHVSLSSEVMPMVRIVPRGHTACADAYLTPTIQRYVQGFRRGFQGQLKNVQVLFMRSDGGLAPMDAFSGSRAVLSGPAGGVVGYSATTYHLEGGQPVIGFDMGGTSTDVSRYAGEFEHVFEASTAGVTLQAPQLDINTVAAGGGSRLFFRSGLFVVGPESAGAHPGPACYRKGGPVTVTDANLVLGRLLPASFPCIFGPGEDQPLSPEASRKALEAVAMEVNSFLTNGPCPASQLSLEEVAMGFVRVANEAMCRPIRALTQARGHDPSAHVLACFGGAGGQHACAIARALGMDTVHIHRHSGLLSALGLALADVVHEAQEPCSLSYTPETFAQLDQRLSRLEEQCVDALQVQGFPRSQISTESFLHLRYQGTDCALMVSAHQHPATACSPRAGDFGAAFVERYMREFGFIIPERPVVVDDVRVRGTGRSGLQLEDTPKIQTGPPHVEKVTQCYFEGGYQETPVYLLGELGYGHQLQGPCLIIDNNSTILVEPGCQAEVTDTGDIRISVGAEGPSMADTRLDPIQLSIFSHRFMSIAEQMGRILQRTAISTNIKERLDFSCALFGPDGGLVSNAPHIPVHLGAMQETVQFQIQHLGADLHPGDVLLSNHPSAGGSHLPDLTVITPVFWPGQTRPVFYVASRGHHADIGGITPGSMPPHSTTLQQEGAVFLSFKLVQGGVFQEEAVTEALRAPGKISGCSGTRNLHDNLSDLRAQVAANQKGIQLVGELIGQYGLDVVQAYMGHIQANAELAVRDMLRAFGTSRQARGLPLEVSAEDHMDDGSPICLRVQINLSQGSAVFDFTGSGSEVFGNLNAPRAITLSALIYCLRCLVGRDIPLNQGCLAPVRVIIPKGSILDPSPEAAVVGGNVLTSQRVVDVILGAFGACSASQGCMNNVTLGNARMGYYETVAGGAGAGPGWHGRSGVHSHMTNTRITDPEILESRYPVILRRFELRPGSGGRGRFRGGDGVVRELVFREEALLSVLTERRAFQPYGLHGGEPGARGLNLLIRKDGRTVNLGGKTSVTVYPGDVFCLHTPGGGGYGDPEDPAPPPGSPPLFPAFPERGSVFEYRRAQEAV

SEQ ID NO: 1931 - protein, 420 aa, Homo sapiens; identical to SEQ ID NO: 1152

SEQ ID NO: 1932 - protein, 420 aa, Homo sapiens; identical to SEQ ID NO: 1152

SEQ ID NO: 1933 - protein, 474 aa, Homo sapiens
MAQLEGYYFSAALSCTFLVSCLLFSAFSRALREPYMDEIFHLPQAQRYCEGRFSLSQWDPMITTLPGLYLVSVGVVKPASWILGWSEHVVCSIGMLRFVNLLFSVGNFYLLYLLFRKIQPRNKASSSIQRILSTLTLAVFPTLYFFNFLYYTEAGSVFFTLFAYLMCLYGNHRTSALLGFCGFMFRQTNIIWAAFCAGHIIAQKCSEAWKTELQKKKEERLPPAKGPLSELRRVLQFLLMYSMSLKNLSMLFLLTWPYMLLLLAFFVFVVVNGGIVVGDRSSHEACLHFPQLFYFFSFTAFFSFPHLLSPTKVKTFLSLVWKRRVQFSVITLVSVFLVWKFTYVHKYLLADNRHYTFYVWKRVFQRHEIVKYLLVPAYMFAGWAVADSLKSKSIFWNLMFFVCLVASTVPQKLLEFRYFILPYIIYRLNMPLPPISRLVCELGCYAVVNFLTFYIFLNKTFQWSDSHDIQRFMW

SEQ ID NO: 1934 - protein, 436 aa, Homo sapiens
RVIRLVLQWAAMYGDLLQEDDVAMAFLEEFYVSVSDDARMMVAFKEQLAELEKTVKQISEDAKAPQKKHKVLLQQFNTGDERAQKRQPIRGSDEVLFKVYCIDHTDTTIRVPVAASVKEVISAVADKLGSGEGLIIVKMNSGGEKVVLKPNDVSVFTTLTINGRLFACPREQFDSLTPLPEQEGPTTGTVGTFELMSSKDLAYQMTTYDWELFNCVLELELIYHTFGRHNFKKTTANLDLFLRRFNEIQFWVVTEICLCSQLSKRVQLLKKCIKIAAHCKEYKNLNSFFGIVMGLSNVAESRLALTWEKLPSKFKKFYAEFESLMDPSRNHKAYRLTAAKLEPPLIPFMPLLIKDMTFTHEGNKTFIDNLVNFEKMRMIANTARTVRYYRSQPFNPDAAQANKNHQDVRSYVRQLNVIDNQRTLSQMSHRLEPRRP

SEQ ID NO: 1935 - protein, 2477 aa, Homo sapiens; identical to SEQ ID NO: 1307

SEQ ID NO: 1936 - protein, 661 aa, Homo sapiens
MGKSEKRVATHGVRCFAKIKMFLLALTCAYVSKSLSGTYMNSMLTQIERQFGIPTSIVGLINGSFEIGNLLLIIFVSYFGTKLHRPIMIGVGCAVMGLGCFLISLPHFLMGQYEYETILPTSNVSSNSFFCVENRSQTLNPTQDPSECVKEMKSLMWIYVLVGNIIRGIGETPIMPLGISYIEDFAKSENSPLYIGILETGMTIGPLIGLLLASSCANIYVDIESVNTDDLTITPTDTRWVGAWWIGFLVCAGVNILTSFPFFFFPKTLPKEGLQENVDGTENAKEKKHRKKAKEEKRGITKDFFVFMKSLSCNPIYMLFILISVLQFNAFINSFTFMPKYLEQQYGKSTAEVVFLMGLYMLPPICLGYLIGGLIMKKFKVTVKKAAHLAFWLCLSEYLLSFLSYVMTCDNFPVAGLTTSYEGVQHQLYVENKVLADCNTRCNCSTNTWDPVCGDNGLAYMSACLAGCEKSVGTGTNMVFQNCSCIQSSGNSSAVLGLCNKGPDCANKLQYFLIIAIFGCFIYSLAGIPGYMVLLRCIKSEEKSLGVGLHAFCIRILAGIPAPIYFGALIDRTCLHWGTLKCGEPGACRMYDINSFRRLYLGLPAALRGASFVPAFFILRLTRTFQFPGDIESSKTDHAEMKLTLKESECTEVLRSKVTED

SEQ ID NO: 1937 - protein, 355 aa, Homo sapiens; identical to SEQ ID NO: 1109

SEQ ID NO: 1938 - protein, 355 aa, Homo sapiens; identical to SEQ ID NO: 1109

SEQ ID NO: 1939 - protein, 179 aa, Homo sapiens; identical to SEQ ID NO: 1128

SEQ ID NO: 1940 - protein, 333 aa, Homo sapiens; identical to SEQ ID NO: 1342

SEQ ID NO: 1941 - protein, 333 aa, Homo sapiens; identical to SEQ ID NO: 1342

SEQ ID NO: 1942 - protein, 333 aa, Homo sapiens; identical to SEQ ID NO: 1342

SEQ ID NO: 1943 - protein, 364 aa, Homo sapiens; identical to SEQ ID NO: 1143

SEQ ID NO: 1944 - protein, 364 aa, Homo sapiens; identical to SEQ ID NO: 1143

SEQ ID NO: 1945 - protein, 434 aa, Homo sapiens
MSILKIHAREIFDSRGNPTVEVDLYTAKGLFRAAVPSGASTGIYEALELRDNDKTRFMGKGVSKAVEHINKTIAPALVSKKLNVVEQEKIDQLMIEMDGTENKSKFGANAILGVSLAVCKAGAVGKGVPLYRHIADLAGNPEVTLPVPAFNVINGGSHAGNKLAMQEFMILPVGASSFREAMRIGAEVYHNLKNVIKEKYGKDATNVGDEGGFAPNILENKEALELLKSAIAKAGYTDQVVIGMDVAASEFYRAGKYDLDFKSPDDASRYITPDQLADLYKSFIKDYPVVSIEDPFDQDDWDAWQKFTATAGIQVVGDDLTVTNPKRIAKAAGEKSCNCLLLKVNQIGSVTESLQACKLAQSNGWGVMVSHRSEETEDTFIADLVVGLCTGQIKTGAPCRSERLAKYNQILRIEEELGSKAKFAGRSFRNPLAK

SEQ ID NO: 1946 - protein, 434 aa, Homo sapiens; identical to SEQ ID NO: 1945

SEQ ID NO: 1947 - protein, 508 aa, Homo sapiens
MLSRALLCLALAWAARVGADALEEEDNVLVLKKSNFAEPAAHNYLLVEFYAPWCGHCKALAPEYAKAAAKLKAEGSEIRLAKVDATEESDLAQQYGVRGYPTIKFFKNGDTASPKEYTAGREADDIVNWLKKRTGPAATTLSDTAAAESLVDSSEVTVIGFFKDAGSDSAKQFLLAAEAVDDIPFGITSNSDVFSKYQLDKDGVVLFKKFDEGRNNFEGEITKEKLLDFIKHNQLPLVIEFTEQTAPKIFGGEIKTHILLFLPKSVSDYDGKLSNFKKAAEGFKGKILFIFIDSDHTDNQRILEFFGLKKEECPAVRLITLEEEMTKYKPESDELTAEKITQFCHHFLEGKIKPHLMSQELPEDWDKQPVKVLVGKNFEEVAFDEKKNVFVEFYAPWCGHCKQLAPIWDKLGETYKDHENIVIAKMDSTANEVEAVKVHSFPTLKFFPASADRTVIDYNGERTLDGFKKFLESGGQDGAGDNDDLDLEEALEPDMEEDDDQKAVKDEL

SEQ ID NO: 1948 - protein, 508 aa, Homo sapiens; identical to SEQ ID NO: 1947

SEQ ID NO: 1949 - protein, 102 aa, Homo sapiens
MKLLAMVALLVTICSLEGALVRRQAAETDVQTLFSQYLQSLTDYGKDLMEKAQPSEIQNQAKAYFQNAQERLTPFVQRTGTNLMDFLSRLMSPEEKPAPAAK

SEQ ID NO: 1950 - protein, 172 aa, Homo sapiens; identical to SEQ ID NO: 1246

SEQ ID NO: 1951 - protein, 2477 aa, Homo sapiens; identical to SEQ ID NO: 1307

SEQ ID NO: 1952 - protein, 127 aa, Homo sapiens; identical to SEQ ID NO: 1237

SEQ ID NO: 1953 - protein, 127 aa, Homo sapiens; identical to SEQ ID NO: 1237

SEQ ID NO: 1954 - protein, 301 aa, Homo sapiens
MEKDFQDIQQLDSEENDHQLIGDEEQGSHVQNLRTENPRWGGQPPSRPFPQRLCSKFRLSLLALAFNILLLVVICVVSSQSMQLQKEFWTLKETLSNFSTTTLMEFKALDSHGGSRNDNLTSWETILEKKQKDIKADHSTLLFHLKHFPLDLRTLTCQLAFFLSNGTECCPVNWVEFGGSCYWFSRDGLTWAEADQYCQMENAHLLVINSREEQEFVVKHRGAFHIWIGLTDKDGSWKWVDGTEYRSNFKNWAFTQPDNWQGHEEGGSEDCAEILSDGLWNDNFCQQVNRWACERKRDITY

SEQ ID NO: 1955 - protein, 461 aa, Homo sapiens; identical to SEQ ID NO: 1295

SEQ ID NO: 1956 - protein, 412 aa, Homo sapiens
MSSKGSVVLAYSGGLDTSCILVWLKEQGYDVIAYLANIGQKEDFEEARKKALKLGAKKVFIEDVSKEFVEEFIWPAVQSSALYEDRYLLGTSLARPCIARKQVEIAQREGAKYVSHGATGKGNDQVRFELTCYSLAPQIKVIAPWRMPEFYNRFKGRNDLMEYAKQHGIPIPVTPKSPWSMDENLMHISYEAGILENPKNQAPPGLYTKTQDPAKAPNTPDVLEIEFKKGVPVKVTNVKDGTTHSTSLDLFMYLNEVAGKHGVGRIDIVENRFIGMKSRGIYETPAGTILYHAHLDIEAFTMDREVRKIKQGLGLKFAELVYTGFWHSPECEFVRHCIDKSQERVEGKVQVSVFKGQVYILGRESPLSLYNEELVSMNVQGDYEPIDATGFININSLRLKEYHRLQSKVTAK

SEQ ID NO: 1957 - protein, 2505 aa, Homo sapiens; identical to SEQ ID NO: 1372

SEQ ID NO: 1958 - protein, 149 aa, Homo sapiens [sequence omitted]

SEQ ID NO: 1959 - protein, 176 aa, Homo sapiens
MKASGTLREYKVVGRCLPTPKCHTPPLYRMRIFAPNHVVAKSRFWYFVSQLKKMKKSSGEIVYCGQVFEKSPLRVKNFGIWLRYDSRSGTHNMYREYRDLTTAGAVTQCYRDMGARHRARAHSIQIMKVEEIAAGKCRRPAVKQFHDSKIKFPLPHRVLRRQHKPRFTTKRPNTFF

SEQ ID NO: 1960 - protein, 176 aa, Homo sapiens; identical to SEQ ID NO: 1959

SEQ ID NO: 1961 - protein, 263 aa, Homo sapiens [sequence omitted]

SEQ ID NO: 1962 - protein, 397 aa, Homo sapiens
MNGPVDGLCDHSLSEEGAFMFTSESVGEGHPDKICDQISDAVLDAHLKQDPNAKVACETVCKTGMVLLCGEITSMAMIDYQRVVRDTIKHIGYDDSAKGFDFKTCNVLVALEQQSPDIAQCVHLDRNEEDVGAGDQGLMFGYATDETEECMPLTIVLAHKLNTRMADLRRSGVLPWLRPDSKTQVTVQYVQDNGAVIPVRVHTIVISVQHNEDITLEAMREALKEQVIKAVVPAKYLDEDTIYHLQPSGRFVIGGPQGDAGVTGRKIIVDTYGGWGAHGGGAFSGKDYTKVDRSAAYAARWVAKSLVKAGLCRRVLVQVSYAIGVAEPLSISIFTYGTSKKTERDELLEVVNKNFDLRPGVIVRDLDLKKPIYQKTACYGHFGRSEFPWEVPKKLVF

SEQ ID NO: 1963 - protein, 309 aa, Homo sapiens; identical to SEQ ID NO: 1196

SEQ ID NO: 1964 - protein, 309 aa, Homo sapiens; identical to SEQ ID NO: 1347

SEQ ID NO: 1965 - protein, 146 aa, Homo sapiens [sequence omitted]

SEQ ID NO: 1966 - protein, 243 aa, Homo sapiens
MAVQISKKRKFVADGIFKAELNEFLTRELAEDGYSGVEVRVTPTRTEIIILATRTQNVLGEKGRRIRELTAVVQKRFGFPEGSVELYAEKVATRGLCAIAQAESLRYKLLGGLAVRRACYGVLRFIMESGAKGCEVVVSGKLRGQRAKSMKFVDGLMIHSGDPVNYYVDTAVRHVLLRQGVLGIKVKIMLPWDPSGKIGPKKPLPDHVSIVEPKDEILPTTPISEQKGGKPEPPAMPQPVPTA

SEQ ID NO: 1967 - protein, 226 aa, Homo sapiens
MDWGTLQSILGGVNKHSTSIGKIWLTVLFIFRIMILVVAAKEVWGDEQADFVCNTLQPGCKNVCYDHYFPISHIRLWALQLIMVSTPALLVAMHVAYRRHEKKRKFMKGEIKNEFKDIEEIKTQKVRIEGSLWWTYTTSIFFRVIFEAVFMYVFYIMYNGFFMQRLVKCNAWPCPNTVDCFISRPTEKTVFTVFMISVSGICILLNITELCYLFIRYCSGKSKRPV

SEQ ID NO: 1968 - protein, 226 aa, Homo sapiens; identical to SEQ ID NO: 1967

SEQ ID NO: 1969 - protein, 520 aa, Homo sapiens; identical to SEQ ID NO: 1218

SEQ ID NO: 1970 - protein, 195 aa, Homo sapiens
MSSSSAKIVKPNGKKRDEFESGISQALLELEMNSELKTQLWELNITAAKEIEVGGGRKAIIIFVPVPQLKSFQKMAKSGKVRELEKKFSGKHVVFIAQRRILPKPTRKSRTKNKQKAQKPTLTSSADRRILEDLVFPSEIVGKRIRVKLVGSRLIKVHLDKAQQNNVEHKVETFSGVYKKPLGKDVNFEFPEVSV

SEQ ID NO: 1971 - protein, 151 aa, Homo sapiens [sequence omitted]

SEQ ID NO: 1972 - protein, 465 aa, Homo sapiens
MAMDTTRCGAQLLTLVEQILAEFQLQEEDLKKVMSRMQKEMDRGLRLETHEEASVKMLPTYVRSTPEGSEVGDFLSLDLGGTNFRVMLVKVGEGEAGQWSVKTKHQMYSIPEDAMTGTAEMLFDYISECISDFLDKHQMKHKKLPLGFTFSFPVRHEDLDKGILLNWTKGFKASGAEGNNIVGLLRDAIKRRGDFEMDVVAMVNDTVATMISCYYEDRQCEVGMIVGTGCNACYMEEMQNVELVEGDEGRMCVNTEWGAFGDSGELDEFLLEYDRMVDESSANPGQQLYEKIIGGKYMGELVRLVLLKLVDENLLFHGEASEQLRTRGAFETRFVSQVESDSGDRKQIHNILSTLGLRPSVTDCDIVRRACESVSTRAAHMCSAGLAGVINRMRESRSEDVMRITVGVDGSVYKLHPSFKERFHASVRRLTPNCEITFIESEEGSGRGAALVSAVACKKACMLAQ

SEQ ID NO: 1973 - protein, 407 aa, Homo sapiens
MQTPGVLLLILGLLAASSSALIRIPLRKFTSIRRTMTEVGGSVEDLILKGPITKYSMQSSPRTKEPVSELLKNYLDAQYYGEIGIGTPPQCFTVVFDTGSSNLWVPSIHCKLLDIACWVHHKYNSDKSSTYVKNGTSFDIHYGSGSLSGYLSQDTVSVPCKSDLGGIKVEKQIFGEATKQPGVVFIAAKFDGILGMGYPFISVNNVLPVFDNLMKQKLVEKNIFSFYLNRDPTGQPGGELMLGGTDSRYYHGELSYLNVTRKAYWQVHMDQLEVGSELTLCKGGCEAIVDTGTSLLVGPVDEVKELQKAIGAVPLIQGEYMIPCEKVSSLPIITFKLGGQNYELHPEKYILKVSQAGKTICLSGFMGMDIPPPSGPLWILGDVFIGCYYTVFDREYNRVGFAKAATL

SEQ ID NO: 1974 - protein, 573 aa, Homo sapiens; identical to SEQ ID NO: 1115

SEQ ID NO: 1975 - protein, 295 aa, Homo sapiens
HQVLYRALVSTKWLAESIRSGKVGPSLRVLDASWYSPGTRQARKEYQERHVPGASFFDIEECRDTTSPYEMMLPSEAHFGDYVGNLGISNDTHVVVYDGDDLGSFYAPRVWWMFRVFGHRTVSVLNGGFRNWLKEGHPVTSEPSRPEPAVFKATLNRSLLKTYEQVLENLQSKRFQLVDSRAQGRYLGTQPEPDAVGLDSGHIRGSVNVPFMNFLTEDGFEKSPEELRAIFQDKKVDLSQPLIATCRKGVTACHIALAAYLCGKPDVAVYDGSWSEWFRRAPPETRVSQGKSGKA

SEQ ID NO: 1976 - protein, 295 aa, Homo sapiens; identical to SEQ ID NO: 1975

SEQ ID NO: 1977 - protein, 142 aa, Homo sapiens
MVLSADDKTNIKNCWGKIGGHGGEYGEEALQRMFAAFPTTKTYFSHIDVSPGSAQVKAHGKKVADALAKAADHVEDLPGALSTLSDLHAHKLRVDPVNFKFLSHCLLVTLACHHPGDFTPAMHASLDKFLASVSTVLTSKYR

SEQ ID NO: 1978 - protein, 152 aa, Homo sapiens [sequence omitted]

SEQ ID NO: 1979 - protein, 351 aa, Homo sapiens
MGNAAAAKKGSEQESVKEFLAKAKEDFLKKWEDPSQNTAQLDHFDRIKTLGTGSFGRVMLVKHKESGNHYAMKILDKQKVVKLKQIEHTLNEKRILQAVNFPFLVKLEFSFKDNSNLYMVMEYVPGGEMFSHLRRIGRFSEPHARFYAAQIVLTFEYLHSLDLIYRDLKPENLLIDQQGYIQVTDFGFAKRVKGRTWTLCGTPEYLAPEIILSKGYNKAVDWWALGVLIYEMAAGYPPFFADQPIQIYEKIVSGKVRFPSHFSSDLKDLLRNLLQVDLTKRFGNLKNGVNDIKNHKWFATTDWIAIYQRKVEAPFIPKFKGPGDTSNFDDYEEEEIRVSINEKCGKEFTEF

SEQ ID NO: 1980 - protein, 140 aa, Homo sapiens [sequence omitted]

SEQ ID NO: 1981 - protein, 140 aa, Homo sapiens [sequence omitted]

SEQ ID NO: 1982 - protein, 184 aa, Homo sapiens [sequence omitted]

SEQ ID NO: 1983 - protein, 204 aa, Homo sapiens
MTEWETATPAVAETPDIKLFGKWSTDDVQINDISLQDYIAVKEKYAKYLPHSAGRYAANGFRKAQCPIVERLTNSMMMHGRNNGKKLMTVRIVKHAFEIIHLLTGENPLQVLVNAIINSGPREDSTRIGRAGTVRRQAVDVSPLRRVNQAIWLLCTGAREAAFRNIKTIAECLADELINARKGSSNSYAIKKKDELERVAKSNR

SEQ ID NO: 1984 - protein, 204 aa, Homo sapiens; identical to SEQ ID NO: 1983

SEQ ID NO: 1985 - protein, 257 aa, Homo sapiens [sequence omitted]

SEQ ID NO: 1986 - protein, 257 aa, Homo sapiens [sequence omitted]

SEQ ID NO: 1987 - protein, 403 aa, Homo sapiens; identical to SEQ ID NO: 1142

SEQ ID NO: 1988 - protein, 588 aa, Homo sapiens
MWILVSWLALVARLVAGTQCPDGQFCPVACCLDQGGANYSCCNPLLDTWPIITSRRLDGSCQIRDHCPDGYSCLLTVSGTSSCCPFSEGVSCDDGQHCCPRGFHCSADGKSCSQISDSLLGAVQCPGSQFECPDSATCCIMIDGSWGCCPMPQASCCEDRVHCCPHGASCDLVHTRCISPTGTHPLLKKFPAQRTNRAVASFSVVCPDAKTQCPDDSTCCELPTGKYGCCPMPNAICCSDHLHCCPQDTVCDLIQSKCISKDYTTDLMTKLPGYPVNEVKCDLEVSCPDGYTCCRLNTGAWGCCPFTKAVCCEDHIHCCPAGFQCHTETGTCELGVLQVPWMKKVTASLSLPDPQILKNDVPCDDFSSCPSNNTCCRLSSGDWGCCPMPEAVCCLDHQHCCPQGFKCMDEGYCQKGDRMVAGLEKMPVRQTTLLQHGDIGCDQHTSCPVGQTCCPSLKGSWACCQLPHAVCCEDRQHCCPAGYTCNVKARTCEKDAGSVQPSMDLTFGSKVGNVECGAGHFCHDNQSCCKDSQGGWACCPYVKGVCCRDGRHCCPIGFHCSAKGTKCLRKKTPRWDILLRDPAPRPLL

SEQ ID NO: 1989 - protein, 504 aa, Homo sapiens; identical to SEQ ID NO: 1317

SEQ ID NO: 1990 - protein, 565 aa, Homo sapiens
MRLYPLVWLFLAACTAWGYPSSPPVVNTVKGKVLGKYVNLEGFAQPVAVFLGIPFAKPPLGSLRFAPPQPAEPWNFVKNTTSYPPMCSQDAVGGQVLSELFTNRKENIPLQFSEDCLYLNVYTPADLTKNSRLPVMVWIHGGGLVVGGASTYDGQVLSAHENVVVVTIQYRLGIWGFFSTGDEHSQGNWGHLDQVAALHWVQDNIANFGGNPGSVTIFGESAGGFSVSALVLSPLAKNLFHRAISESGVVLTSALITTDSKPIANLIATLSGCKTTTSAVMVHCLRQKTEDELLETSLKLNLFKLDLLGNPKESYPFLPTVIDGVVLPKTPEEILAEKSFNTVPYIVGINKQEFGWIIPTLMGYPLSEGKLDQKTAKSLLWKSYPTLKISEKMIPVVAEKYFGGTDDPAKRKDLFQDLVADVMFGVPSVMVSRSHRDAGAPTFMYEFEYRPSFVSAMRPKTVIGDHGDELFSVFGSPFLKDGASEEETNLSKMVMKYWANFARNGNPNGGGLPHWPEYDQKEGYLKIGASTQAAQRLKDKEVAFWSELRAKEAAEEPSHWKHVEL

SEQ ID NO: 1991 - protein, 736 aa, Homo sapiens
MATEGMILTNHDHQIRVGVLTVSDSCFRNLAEDRSGINLKDLVQDPSLLGGTISAYKIVPDEIEEIKETLIDWCDEKELNLILTTGGTGFAPRDVTPEATKEVIEREAPGMALAMLMGSLNVTPLGMLSRPVCGIRGKTLIINLPGSKKGSQECFQFILPALPHAIDLLRDAIVKVKEVHDELEDLPSPPPPLSPPPTTSPHKQTEDKGVQCEEEEEEKKDSGVASTEDSSSSHITAAALARKIPDSIISRGVQVLPRDTASLSTTPSESPRAQATSRLSTASCPTPKVQSRCSSKENILRASHSAVDITKVARRHRMSPFPLTSMDKAFITVLEMTPVLGTEIINYRDGMGRVLAQDVYAKDNLPPFPASVKDGYAVRAADGPGDRFIIGESQAGEQPTQTVMPGQVMRVTTGAPIPCGADAVVQVEDTELIRESDDGTEELEVRILVQARPGQDIRPIGHDIKRGECVLAKGTHMGPSEIGLLATVGVTEVEVNKFPVVAVMSTGNELLNPEDDLLPGKIRDSNRSTLLATIQEHGYPTINLGIVGDNPDDLLNALNEGISRADVIITSGGVSMGEKDYLKQVLDIDLHAQIHFGRVFMKPGLPTTFATLDIDGVRKIIFALPGNPVSAVVTCNLFVVPALRKMQGILDPRPTIIKARLSCDVKLDPRPEYHRCILTWHHQEPLPWAQSTGNQMSSRLMSMRSANGLLMLPPKTEQYVELHKGEVVDVMVIGRL

SEQ ID NO: 1992 - protein, 627 aa, Homo sapiens
MATTQISKDELDELKEAFAKVDLNSNGFICDYELHELFKEANMPLPGYKVREIIQKLMLDGDRNKDGKISFNEFVYIFQEVKSSDIAKTFRKAINRKEGICALGGTSELSSEGTQHSYSEEEKYAFVNWINKALENDPDCRHVIPMNPNTDDLFKAVGDGIVLCKMINLSVPDTIDERAINKKKLTPFIIQENLNLALNSASAIGCHVVNIGAEDLRAGKPHLVLGLLWQIIKIGLFADIELSRNEALAALLRDGETLEELMKLSPEELLLRWANFHLENSGWQKINNFSADIKDSKAYFHLLNQIAPKGQKEGEPRIDINMSGFNETDDLKRAESMLQQADKLGCRQFVTPADVVSGNPKLNLAFVANLFNKYPALTKPENQDIDWTLLEGETREERTFRNWMNSLGVNPHVNHLYVDLQDALVILQLYERIKVPVDWSKVNKPPYPKLGANMKKLENCNYAVELGKNQAKFSLVGIGGQDLNDGNPTLTLAVVWQLMRRYTLNVMEDLGEGQKATDDIIVNWVNGTLSEAGKSTSIQSFKDKTISSSLAVVDLIDAIQPGCINYDLVKTGNLTEEDKHNNAKYAVSMARRIGARVYALPEDLVEVKPKMVMTVFACLMGRGMKSV

SEQ ID NO: 1993 - protein, 479 aa, Homo sapiens
MKHPAYTLLLSLIMSMCAGSKGLAEQLTKENLTVSLLPPNFHKENTVTNDWIPEGEEDDDYLDLEKLLSEDDDYIYVVDAVSPTDSESSAGNILQLFQGKSRIQRLNILNAKFAFNLYRVLKDQATSSDNIFIAPVGISTAMGMISLGLRGETHEEVHSVLHFKDFVNASSKYEVTTIHNLFRKLTHRLFRRNFGYTLQSVNDLYIQKQFPIREDFKAAMREFYFAEAQEADFSDPAFISKANSHILKLTKGLIKEALENTDSATQMMILNCIYFKGAWMNKFPVEMTHNHNFRLNEREVVKVSMMQTKGNFLAANDQELDCDILQLEYVGGISMLIVIPRKLSGMKTLEAQLTPQVVERWQKSMTNRTREVLLPKFKLEKNYNLVEVLKSMGITKLFNKNGNMSGISDQRIIIDLFKHQSTITVNEEGTQAAAVTTVGFMPLSTQVRFTVDRPFLFLVYEHRTSCLLFMGRVANPAKS

SEQ ID NO: 1994 - protein, 236 aa, Homo sapiens
MNIFDRKINFDALLKFSHITPSTQQHLKKVYASFALCMFVAAAGAYVHVVTRFIQAGLLSALGALALMICLMATPHSHETEQKRLGLLAVAFLTGVGLGPALELCIAINPSILPTAFMGTAMIFTCFSLSALYARRRSYLFLGGILMSAMSLMFVSSLGNLFFGSIWLFQANLYMGLLVMCGFVLFDTQLIIEKAEHGDKDYIWHCIDLFLDFVTLFRKLMLILAFNEKDKKKEKK

SEQ ID NO: 1995 - protein, 211 aa, Homo sapiens
MAPSRNGMILKPHFHKDWQQRVDTWFNQPARKIRRRKARQAKARRIAPRPASGPISPIVRCPTVRYHTKVRAGRGFSLEELRVAGIHKKMARTIGISVDPRRRNKSTESLQANVQRLKEYRSKLILFPRKPSAPKKGDSSAEELKLATQLTGPVMPIRNVYKKEKARAITEEEKNFKAFASLRMARANARLFGIRAKRAKEAAEQDVEKKK

SEQ ID NO: 1996 - protein, 221 aa, Homo sapiens; identical to SEQ ID NO: 1304

SEQ ID NO: 1997 - protein, 339 aa, Homo sapiens
MWWSLIPLSCLLALTSAHDKPSSHPLSDDMINYINKQNTTWQAGRNFYNVDISYLKKLCGTVLGGPNLPERVGFSEDINLPESFDAREQWSNCPTIAQIRDQGSCGSCWAFGAVEAMSDRICIHTNGRVNVEVSAEDLLTCCGIQCGDGCNGGYPSGAWNFWTRKGLVSGGVYNSHIGCLPYTIPPCEHHVNGSRPPCTGEGDTPKCNKMCEAGYSTSYKEDKHYGYTSYSVSDSEKEIMAEIYKNGPVEGAFTVFSDFLTYKSGVYKHEAGDVMGGHAIRILGWGIENGVPYWLVANSWNVDWGDNGFFKILRGENHCGIESEIVAGIPRTQQYWGRF

SEQ ID NO: 1998 - protein, 509 aa, Homo sapiens
MYSPLCLTQDEFHPFIEALLPHVRAFAYTWFNLQARKRKYFKKHEKRMSKEEERAVKDELLSEKPEVKQKWASRLLAKLRKDIRPEYREDFVLTVTGKKPPCCVLSNPDQKGKMRRIDCLRQADKVWRLDLVMVILFKGIPLESTDGERLVKSPQCSNPGLCVQPHHIGVSVKELDLYLAYFVHAADSSQSESPSQPSDADIKDQPENGHLGFQDSFVTSGVFSVTELVRVSQTPIAAGTGPNFSLSDLESSSYYSMSPGAMRRSLPSTSSTSSTKRLKSVEDEMDSPGEEPFYTGQGRSPGSGSQSSGWHEVEPGMPSPTTLKKSEKSGFSSPSPSQTSSLGTAFTQHHRPVITGPRASPHATPSTLHFPTSPIIQQPGPYFSHPAIRYHPQETLKEFVQLVCPDAGQQAGQVGFLNPNGSSQGKVHNPFLPTPMLPPPPPPPMARPVPLPMPDTKPPTTSTEGGAASPTSPTYSTPSTSPANRFVSVGPRDPSFVNIPQQTQSWYLG

SEQ ID NO: 1999 - protein, 527 aa, Homo sapiens; identical to SEQ ID NO: 1179

SEQ ID NO: 2000 - protein, 770 aa, Homo sapiens
MAQWNQLQQLDTRYLEQLHQLYSDSFPMELRQFLAPWIESQDWAYAASKESHATLVFHNLLGEIDQQYSRFLQESNVLYQHNLRRIKQFLQSRYLEKPMEIARIVARCLWEESRLLQTAATAAQQGGQANHPTAAVVTEKQQMLEQHLQDVRKRVQDLEQKMKVVENLQDDFDFNYKTLKSQGDMQDLNGNNQSVTRQKMQQLEQMLTALDQMRRSIVSELAGLLSAMEYVQKTLTDEELADWKRRQQIACIGGPPNICLDRLENWITSLAESQLQTRQQIKKLEELQQKVSYKGDPIVQHRPMLEERIVDLFRNLMKSAFVVERQPCMPMHPDRPLVIKTGVQFTTKVRLLVKFPELNYQLKIKVCIDKDSGDVAALRGSRKFNILGTNTKVMNMEESNNGSLSAEFKHLTLREQRCGNGGRANCDASLIVTEELHLITFETEVYHQGLKIDLETHSLPVVVISNICQMPNAWASILWYNMLTNNPKNVNFFTKPPIGTWDQVAEVLSWQFSSTTKRGLSIEQLTTLAEKLLGPGVNYSGCQITWAKFCKENMAGKGFSFWVWLDNIIDLVKKYILALWNEGYIMGFISKERERAILSTKPPGTFLLRFSESSKEGGVTFTWVEKDISGKTQIQSVEPYTKQQLNNMSFAEIIMGYKIMDATNILVSPLVYLYPDIPKEEAFGKYCRPESQEHPEADPGSAAPYLKTKFICVTPTTCSNTIDLPMSPRTLDSLMQFGNNGEGAEPSAGGQFESLTFDMDLTSECATSPM

SEQ ID NO: 2001 - protein, 700 aa, Homo sapiens
MGSSSERRDSVLWSDIPKGPLSAYRARASFNSKELMLFWDGQDVLDFKKTIFSTLENDPLFARPFGADLPLEKERELNFLRCKRVFEYGFFNAEDMLKNPLKILVLMNCLGMYDWSLANKCVLHMLVFGSTIIGSGSEHHFKYLEKIYNLEIFGCFALTELSHGSNTKAMRTTAHYDPATQEFILHSPDFEAAKFWVGNLGKTATHAVVFAQLYTPDGQCRGLHSFLVQIRDPKTLLPMPGVMVGDMGKKLGQNGLDNGFAMFHKVRIPRQNLLDRTGNVTSEGHYHTPFKDVRQRLGASLGSLSSGRISIISISVVNLKLAVIIAIRFSATRRQFGPTDKEEIPVLEYPLQQWRLLPYLAAAYALDHFSKTIFLDLIELQRAGKVGTTVTGRQSSGREIHALASAGKPLASWTAQRGIQECREVVGGHGYLAMNRFGELRNDNDPNCTYEGDNNVLLQQTSNYLLSLLEHPLQDGAHFTSPLKTVNFLEAYPGILGQKFMASSKADWLDSEAPLAAYRWLVCYLLRESHQRYCQEKKSRGSDFEARNNSQVYGCRPLALAFMELTVMQRFHEHTHSSSVPPSLRTVLGRLSMLYGLWCLSQHTALLYRGGYISGEQTGKAMEDAILMLCVQLKDDAVALVDAIAPSDFVLGSPIGRADGELYKNLWAAVLQQSGVLERAAWWPEFTANKSVANRLKSQL

SEQ ID NO: 2002 - protein, 160 aa, Homo sapiens
MCHSRNHLHTMTGLRAPAPAPSTSPELRRGSGPEIFTFDPLPERAVASAVRPNTSRGHRKRSRRVLYPRVVRRQLPTEEPNIAKRILFLLLAIIFCQILMAEEGVSQALAPEDATSAISPEPISVPITAPPVLEPLNLTSESSDYALDLKAFLQQHPAAF

SEQ ID NO: 2003 - protein, 533 aa, Homo sapiens; identical to SEQ ID NO: 1359

SEQ ID NO: 2004 - protein, 511 aa, Homo sapiens
MALRAMRGIVNGAAPELPVPTGGPMAGAREQALAVSRNYLSQPRLTYKTVSGVNGPLVILDHVKFPRYAEIVHLTLPDGTKRSGQVLEVSGSKAVVQVFEGTSGIDAKKTSCEFTGDILRTPVSEDMLGRVFNGSGKPIDRGPVVLAEDFLDIMGQPINPQCRIYPEEMIQTGISAIDGMNSIARGQKIPIFSAAGLPHNEIAAQICRQAGLVKKSKDVVDYSEENFAIVFAAMGVNMETARFFKSDFEENGSMDNVCLFLNLANDPTIERIITPRLALTTAEFLAYQCEKHVLVILTDMSSYAEALREVSAAREEVPGRRGFPGYMYTDLATIYERAGRVEGRNGSITQIPILTMPNDDITHPIPDLTGYITEGQIYVDRQLHNRQIYPPINVLPSLSRLMKSAIGEGMTRKDHADVSNQLYACYAIGKDVQAMKAVVGEEALTSDDLLYLEFLQKFEKNFITQGPYENRTVYETLDIGWQLLRIFPKEMLKRIPQSTLSEFYPRDSAKH

SEQ ID NO: 2005 - protein, 425 aa, Homo sapiens
MNYSRFLTATSLARKTSPIRATVEIMSRAPKDIISLAPGSPNPKVFPFKSAVFTVENGSTIRFEGEMFQRALQYSSSYGIPELLSWLKQLQIKLHNPPTVNYSPNEGQMDLCITSGCQDGLCKVFEMLINPGDTVLVNEPLYSGALFAMKPLGCNFISVPSDDCGIIPEGLKKVLSQWKPEDSKDPTKRTPKFLYTIPNGNNPTGNSLTGDRKKEIYELARKYDFLIIEDDPYYFLQFTKPWEPTFLSMDVDGRVIRADSLSKVISSGLRVGFITGPKSLIQRIVLHTQISSLHPCTLSQLMISELLYQWGEEGFLAHVDRAIDFYKNQRDFILAAADKWLRGLAEWHVPKAGMFLWIKVNGISDAKKLIEEKAIEREILLVPGNSFFVDNSAPSSFFRASFSQVTPAQMDLVFQRLAQLIKDVS

1. A method of predicting at least one toxic effect of a test agent comprising:
(a) providing nucleic acid hybridization data for a plurality of genes from at least one liver cell or tissue sample exposed to the test agent;
(b) converting the hybridization data from at least one gene corresponding to a gene or gene fragment of Table 2 to a gene expression measure;
(c) generating a gene regulation score from the gene expression measure for said at least one gene;
(d) generating a sample prediction score for the agent; and
(e) comparing the sample prediction score to a liver toxicity reference prediction score, thereby predicting at least one toxic effect of the test agent.

2. A method of claim 1, wherein at least one cell or tissue sample is exposed to a test agent vehicle.

3. A method of claim 2, wherein step (b) comprises normalizing the hybridization data for background hybridization and for test agent vehicle induced expression.

4. A method of claim 2, wherein the gene expression measure is a gene fold change value.

5. A method of claim 4, wherein the fold change value is calculated by a log scale linear additive model.

6. A method of claim 5, wherein the log scale linear additive model is a robust multi-array (RMA).

7. A method of claim 1, wherein the nucleic acid hybridization data has been screened by a quality control process that measures outlier data.

8. A method of claim 1, wherein step (c) comprises dimension reduction using Partial Least Squares (PLS).

9. A method of claim 1, wherein the sample prediction score is generated with a weighted index score for each gene.

10. A method of claim 9, wherein the weighted index score is a PLS score from Table 2.

11. A method of claim 1, wherein the sample prediction score for the agent is generated from the gene regulation score for said at least one gene.

12. A method of claim 11, wherein the sample prediction score for the agent is generated from the gene regulation score for at least about 10 genes.

13. A method of claim 11, wherein the sample prediction score for the agent is generated from the gene regulation score for at least about 50 genes.

14. A method of claim 11, wherein the sample prediction score for the agent is generated from the gene regulation score for at least about 100 genes.

15. A method of claim 1, wherein the toxicity reference prediction score is generated by a method comprising:
(a) providing nucleic acid hybridization data for a plurality of genes from at least one liver cell or tissue sample exposed to a hepatotoxin and at least one liver cell or tissue sample exposed to the toxin vehicle;
(b) converting the hybridization data from at least one gene to fold change values;
(c) generating a gene regulation score from the fold change value for said at least one gene; and
(d) generating a toxicity reference prediction score for the toxin.

16. A method of claim 15, wherein the hepatotoxin is selected from the group consisting of: 17-alpha-ethynylestradiol (EE), 2-acetylaminofluorene (2 -AAF), 3-methylcholanthrene, Abacavir, acetaminophen (APAP; paracetamol), acetylsalicylic acid (aspirin), allyl alcohol, Amineptine, Amiodarone, Amitriptyline, ANIT (1-naphthyl isothiocyanate), Eisai (Aricept™), Aroclor 1254, AY-25329, B1 compound, Bicalutamide, bromobenzene, Bupropion, Carbamazepine, carbon tetrachloride (CCl4), Ceftazidime, chloroform, Chlorpheniramine maleate (ChlorTrimeton), CI 1000, Ciprofibrate, Clofibrate, Colchicine, Compound A (AZ), Compound B (AZ), Sulindac, Cyproterone acetate, CZB777, Dantrolene, Demeclocycline, Diclofenac, diethylnitrosamine (DEN), Diflunisal, Diphenhydramine, Diquat, DMN (dimethylnitrosamine), dopamine, Epirubicin, Erythromycin estolate, ethanol, Etoposide, Famotidine (Pepcid AC), Felbamate, Fenofibrate, Flutamide, Gemfibrozil, Gentamicin, Hydrazine (Isoniazid), hydroxyurea, Indomethacin, Labetalol, L-ethionine, LPS (lipopolysaccharide), mannitol (d-mannitol) Menadione, Metformin, Methapyrilene, Methotrexate, methyldopa, Lovastatin (Mevacor), Monocrotaline, Org 10000, Org 20000, Paraquat, Perhexilene, Phenacetin, phenobarbital, physostigmine, Plicamycin, Rifabutin, Rifampin, Rosiglitazone, Simvastatin, Stavudine, Streptomycin, Tacrine, Tamoxifen, TCDD (2,3,7,8-tetrachlorodibenzo-p-dioxin), Temozolomide, Tetracycline, thioacetamide, Valproate, Wy-14,643, Zidovudine and Zileuton.

17. A method of claim 1, wherein step (a) comprises loading nucleic acid hybridization data to a server via a remote connection.

18. A method of claim 17, wherein the remote connection is over the internet.

19. A method of claim 1, wherein the toxicity reference prediction score is provided in a database.

20. A method of claim 19, wherein the toxicity reference prediction score is derived from a hepatotoxicity model.

21. A method of claim 20, wherein the toxicity model is selected from the group consisting of an individual toxin model, a general toxicity model and a tissue pathology model.

22. A method of claim 21, wherein the general toxicity model is a general hepatotoxicity model.

23. A method of claim 21, wherein the toxicity model is a human-specific hepatotoxicity model.

24. A method of claim 21, wherein the tissue pathology model is selected from the group consisting of: a general toxicity model, a negative control model, a pharmacologically active, negative control model, a genotoxic/carcinogenic model, a non-genotoxic model, a rat-specific, non-genotoxic model, a cholestasis model, a hepatitis model, a human-specific toxicity model, an inducer of liver enlargement model, a peroxisome proliferator model, a microvesicular steatosis model, a macrovesicular steatosis model, a general steatosis model and a necrosis model.

25. A method of claim 1, further comprising: (f) generating a report comprising information related to the toxic effect.

26. A method of claim 25, wherein the report comprises information related to the mechanism of the toxic effect.

27. A method of claim 25, wherein the report comprises information related to the toxins used to prepare the toxicity reference prediction score.

28. A method of 25, wherein the report comprises information related to at least one similarity between the test agent and a toxin.

29. A method of claim 18, wherein the hybridization data is contained in a plain text file.

30. A method of claim 18, wherein the hybridization data is contained in a CEL file.

31. A method of claim 1, wherein the nucleic acid hybridization data is annotated with information selected from the group consisting of customer data, cell or tissue sample data, hybridization technology data and test agent data.

32. A method of claim 17, wherein step (a) further comprises selecting at least one toxicity model to predict said at least one toxic effect.

33. A method of providing a report comprising a prediction of at least one toxic effect of a test agent comprising:
(a) receiving nucleic acid hybridization data for a plurality of genes from at least one liver cell or tissue sample exposed to the test agent and at least one liver cell or tissue sample exposed to the test agent vehicle to a server via a remote link, wherein said plurality of genes is selected from the genes or gene fragments of Table 2;
(b) converting the hybridization data from at least one gene to robust multi-array (RMA) fold change values;
(c) generating a gene regulation score from the RMA fold change value for said at least one gene;
(d) generating a sample prediction score for the agent;
(e) comparing the sample prediction score to a toxicity reference prediction score; and
(f) providing a report comprising information related to said at least one toxic effect.

34. A method of creating a toxicity model comprising:
(a) providing nucleic acid hybridization data for a plurality of genes from at least one liver cell or tissue sample exposed to a toxin;
(b) converting the hybridization data from at least one gene corresponding to a gene or gene fragment of Table 2 to a gene expression measure;
(c) generating a gene regulation score from gene expression measure for said at least one gene;
(d) generating a toxicity reference prediction score for the toxin, thereby creating a toxicity model.

35. A method of claim 34, wherein the toxin is selected from the group consisting of: 17-alpha-ethynylestradiol (EE), 2-acetylaminofluorene (2-AAF), 3-methylcholanthrene, Abacavir, acetaminophen (APAP; paracetamol), acetylsalicylic acid (aspirin), allyl alcohol, Amineptine, Amiodarone, Amitriptyline, ANIT (1-naphthyl isothiocyanate), Eisai (Aricept™), Aroclor 1254, AY-25329, BI compound, Bicalutamide, bromobenzene, Bupropion, Carbamazepine, carbon tetrachloride (CCl4), Ceftazidime, chloroform, Chlorpheniramine maleate (ChlorTrimeton), CI 1000, Cipro fibrate, Clofibrate, Colchicine, Compound A (AZ), Compound B (AZ), Sulindac, Cyproterone acetate, CZB777, Dantrolene, Demeclocycline, Diclofenac, diethylnitrosamine (DEN), Diflunisal, Diphenhydramine, Diquat, DMN (dimethyhiitrosamine), dopamine, Epirubicin, Erythromycin estolate, ethanol, Etoposide, Famotidine (Pepcid AC), Felbamate, Fenofibrate, Flutamide, Gemfibrozil, Gentamicin, Hydrazine (Isoniazid), hydroxyurea, Indomethacin, Labetalol, L-ethionine, LPS (lipopolysaccharide), mannitol (d-mannitol) Menadione, Metformin, Methapyrilene, Methotrexate, methyldopa, Lovastatin (Mevacor), Monocrotaline, Org 10000, Org 20000, Paraquat, Perhexilene, Phenacetin, phenobarbital, physostigmine, Plicamycin, Rifabutin, Rifampin, Rosiglitazone, Simvastatin, Stavudine, Streptomycin, Tacrine, Tamoxifen, TCDD (2,3,7,8-tetrachlorodibenzo-p-dioxin), Temozolomide, Tetracycline, thioacetamide, Valproate, Wy-14,643, Zidovudine and Zileuton.

36. A method of claim 34, wherein at least one cell or tissue sample is exposed to a test agent vehicle.

37. A method of claim 34, wherein the step (b) comprises normalizing the hybridization data for background hybridization and for test agent vehicle induced expression.

38. A method of claim 34, wherein the gene expression measure is a gene fold change value.

39. A method of claim 34, wherein the fold change value is calculated by a log scale linear additive model.

40. A method of claim 34, wherein the log scale linear additive model is a robust multi-array (RMA).

41. A method of claim 34, wherein the generating of step (c) comprises dimension reduction using Partial Least Squares (PLS).

42. A method of claim 34, wherein step (d) comprises the generation of a weighted index score for each gene.

43. A method of claim 34, wherein the toxicity reference prediction score for the toxin is generated from the gene regulation score for said at least one gene.

44. A method of claim 43, wherein the toxicity reference prediction score for the agent is generated from the gene regulation score for at least about 10 genes.

45. A method of claim 43, wherein the toxicity reference prediction score for the agent is generated from the gene regulation score for at least about 50 genes.

46. A method of claim 43, wherein the toxicity reference prediction score for the agent is generated from the gene regulation score for at least about 100 genes.

47. A method of claim 34, wherein the toxicity model is selected from the group consisting of an individual toxin model, a general toxicity model and a tissue pathology model.

48. A method of claim 47, wherein the general toxicity model is a general hepatotoxicity model.

49. A method of claim 47, wherein the toxicity model is a human-specific hepatotoxicity model.

50. A method of claim 47, wherein the tissue pathology model is selected from the group consisting of: a general toxicity model, a negative control model, a pharmacologically active, negative control model, a genotoxic/carcino genie model, a non-genotoxic model, a rat-specific, non-genotoxic model, a cholestasis model, a hepatitis model, a human-specific toxicity model, an inducer of liver enlargement model, a peroxisome proliferator model, a microvesicular steatosis model, a macrovesicular steatosis model, a general steatosis model and a necrosis model.

51. A method of claim 34, further comprising validating the model.

52. A method of claim 51, wherein the validation comprises using a cross-validation procedure.

53. A method of claim 52, wherein the cross-validation procedure is a ⅔/⅓ validation procedure.

54. A computer system comprising:
(a) a computer readable medium comprising a toxicity model for predicting toxicity of a test agent, wherein the toxicity model is generated by a method of claim 29; and
(b) software that allows a user to predict at least one toxic effect of a test agent by comparing a sample prediction score to a toxicity reference prediction score in the toxicity model.

55. A computer system of claim 54, wherein the toxicity model comprises a model selected from Table 2.

56. A computer system of claim 54, wherein the toxicity model comprises weighted index scores for at least one gene or gene fragment of Table 2.

57. A computer system of claim 56, wherein the toxicity model comprises weighted index scores for at least 50 genes or gene fragments of Table 2.

58. A computer system of claim 56, wherein the toxicity model comprises weighted index scores for at least 100 genes or gene fragments of Table 2.

59. A computer system of claim 56, wherein the toxicity model comprises weighted index scores for nearly all the genes or gene fragments of Table 2.

60. A computer system of claim 54, wherein the software allows a user to calculate a sample prediction score from the nucleic acid hybridization data.

61. A computer system of claim 54, wherein the software enables a user to compare quantitative gene expression information obtained from a cell or tissue sample exposed to a test agent to the quantitative gene expression information in the toxicity model to predict whether the test agent is a toxin.

62. A computer system of claim 54, further comprising software that allows a user to transmit from a remote location nucleic acid hybridization data from a cell or tissue sample exposed to a test agent to predict whether the test agent is a toxin.

63. A computer system of claim 54, wherein the nucleic acid hybridization data from the sample may be transmitted via the Internet.

64. A computer system of claim 54, wherein the nucleic acid hybridization data is microarray hybridization data.

65. A computer system of claim 54, wherein the nucleic acid hybridization data is PCR data.

66. A computer system of claim 54, further comprising a data structure comprising at least one toxicity reference prediction score.

67. A computer system of claim 54, wherein the data structure further comprises at least one gene PLS score.

68. A computer system of claim 54, wherein the data structure further comprises at least one gene regulation score.

69. A computer system of claim 54, wherein the data structure further comprises at least one sample prediction score.

70. A computer readable medium comprising a data structure comprising at lest least one toxicity reference prediction score and software for accessing said data structure.

71. A computer system of claim 54, wherein the toxicity model is selected from the group consisting of an individual toxin model, a general toxicity model and a tissue pathology model.

72. A computer system of claim 54, wherein the general toxicity model is a general hepatotoxicity model.

73. A computer system of claim 54, wherein the toxicity model is a human-specific hepatotoxicity model.

74. A computer system of claim 54, wherein the tissue pathology model is selected from the group consisting of: a general toxicity model, a negative control model, a pharmacologically active, negative control model, a genotoxic/carcinogenic model, a non-genotoxic model, a rat-specific, non-genotoxic model, a cholestasis model, a hepatitis model, a human-specific toxicity model, an inducer of liver enlargement model, a peroxisome proliferator model, a microvesicular steatosis model, a macrovesicular steatosis model, a general steatosis model and a necrosis model.

75. A solid support comprising at least two probes, wherein each of the probes comprises a sequence that specifically hybridizes to a gene or gene fragment in Table 2.

76. A solid support of claim 75, wherein each of the probes comprises a sequence that specifically hybridizes to at least 5 genes or gene fragments in Table 2.

77. A solid support of claim 75, wherein each of the probes comprises a sequence that specifically hybridizes to at least 10 genes or gene fragments in Table 2.

78. A solid support of claim 75, wherein each of the probes comprises a sequence that specifically hybridizes to at least 50 genes or gene fragments in Table 2.

79. A solid support of claim 75, wherein each of the probes comprises a sequence that specifically hybridizes to at least 100 genes or gene fragments in Table 2.

80. A solid support of claim 75, wherein the solid support is an array comprising probes which individually specifically hybridize to substantially all of the genes or gene fragments in Table 2.

81. A solid support of claim 75, wherein the solid support is selected from the group consisting of a membrane, a glass support, a collection of beads and a silicon support.

82. A solid support of claim 75, wherein the solid support is an array comprising at least 10 different oligonucleotides in discrete locations per square centimeter.

83. A solid support of claim 82, wherein the array comprises at least about 100 different oligonucleotides in discrete locations per square centimeter.

84. A solid support of claim 82, wherein the array comprises at least about 1000 different oligonucleotides in discrete locations per square centimeter.

85. A solid support of claim 82, wherein the array comprises at least about 10,000 different oligonucleotides in discrete locations per square centimeter.

86. A method of predicting at least one toxic effect of a compound, comprising:
(a) detecting the level of expression in a tissue or cell sample exposed to the compound often or more genes or proteins from Tables 1, 2, 5, and 6; wherein differential expression of the genes in Tables 1, 2, 5, and 6 is indicative of at least one toxic effect.

87. A method of predicting the progression of a toxic effect of a compound, comprising:
(a) detecting the level of expression in a tissue or cell sample exposed to the compound often or more genes or proteins from Tables 1, 2, 5, and 6; wherein differential expression of the genes in Tables 1, 2, 5, and 6 is indicative of toxicity progression.

88. A method of predicting the hepatotoxicity of a compound, comprising:
(a) detecting the level of expression in a tissue or cell sample exposed to the compound often or more genes or proteins from Tables 1, 2, 5, and 6; wherein differential expression of the genes in Tables 1, 2, 5, and 6 is indicative of hepatotoxicity.

89. A method of identifying an agent that modulates the onset or progression of a toxic response, comprising:
(a) exposing a cell to the agent and a known toxin; and
(b) detecting the expression level often or more genes or proteins from Tables 1, 2, 5, and 6; wherein differential expression of the genes in 1, 2, 5, and 6 is indicative of toxicity.

90. A method of predicting the cellular pathways that a compound modulates in a cell, comprising:
(a) detecting the level of expression in a tissue or cell sample exposed to the compound often or more genes or proteins from Tables 1, 2, 5, and 6; wherein differential expression of the genes in Tables 1, 2, 5, and 6 is associated the modulation of at least one cellular pathway.

91. A method of predicting at least one toxic effect of a test compound, comprising:
(a) preparing a gene expression profile from a liver cell or tissue sample exposed to the test compound; and
(b) comparing the gene expression profile to a database comprising quantitative gene expression information for at least ten genes, gene fragments, or proteins of Tables 1, 2, 5, and 6 from a liver cell or tissue sample that has been exposed to at least one toxin and quantitative gene expression information for at least ten genes, gene fragments, or proteins of Tables 1, 2, 5, and 6 from a control liver cell or tissue sample exposed to the toxin excipient, thereby predicting at least one toxic effect of the test compound.

92. The method of claim 86, wherein the proteins are secreted proteins.
